(19) United States
(12) Patent Application Publication
(10) Pub. No.: US 2023/0265179 A1
(43) Pub. Date: Aug. 24, 2023

(54) CYTOKINE VARIANT ANTIBODIES AND METHODS OF USE

(71) Applicant: Twist Bioscience Corporation, South San Francisco, CA (US)

(72) Inventors: Aaron SATO, Burlingame, CA (US); Linya WANG, Milpitas, CA (US); Fumiko AXELROD, Palo Alto, CA (US); Sean PETERSON, Burlingame, CA (US); Tom YUAN, San Francisco, CA (US)

(21) Appl. No.: 18/056,648

(22) Filed: Nov. 17, 2022

Related U.S. Application Data
(60) Provisional application No. 63/280,834, filed on Nov. 18, 2021.

(51) Int. Cl. C07K 16/24

(52) U.S. Cl. CPC C07K 16/24; C07K 2317/622; C07K 2317/565; C07K 2317/31; C07K 2317/55; C07K 2317/626; C07K 2317/24

(57) ABSTRACT

Provided herein are methods and compositions relating to cytokine variant libraries having nucleic acids encoding for immunoglobulins that bind to cytokines. Libraries described herein include variegated libraries comprising nucleic acids each encoding for a predetermined variant of at least one predetermined reference nucleic acid sequence. Further described herein are protein libraries generated when the nucleic acid libraries are translated. Further described herein are cell libraries expressing variegated nucleic acid libraries described herein.

### CROSS REFERENCE

[0001] This application claims the benefit of U.S. Provisional Patent Application No. 63/280,834, filed on Nov. 18, 2021, which is incorporated by reference in its entirety.

### SEQUENCE LISTING

[0002] The instant application contains a Sequence Listing which has been submitted electronically in XML format and is hereby incorporated by reference in its entirety. Said XML copy, created on Mar. 7, 2023, is named 44854-841_201_SL.xml and is 2,585,933 bytes in size.

### BACKGROUND

[0003] Cytokines are a large family of cell-signaling proteins crucial in controlling growth and activity of other immune system cells and blood cells. When released, they aid cell-to-cell communication during immune responses and stimulate the movement of cells toward sites of inflammation, infection, trauma, sepsis, and cancer. There is a need for improved therapeutics targeting cytokines.

### INCORPORATION BY REFERENCE

[0004] All publications, patents, and patent applications mentioned in this specification are herein incorporated by reference to the same extent as if each individual publication, patent, or patent application was specifically and individually indicated to be incorporated by reference.

### BRIEF SUMMARY

[0005] Provided herein are antibodies or antibody fragments comprising a variable domain, heavy chain region (VH) and a variable domain, light chain region (VL), wherein the VH comprises an amino acid sequence at least about 90% identical to any one of SEQ ID NOs: 1-1628; and the VL comprises an amino acid sequence at least about 90% identical to any one of SEQ ID NOs: 1629-2643. Further provided herein are antibodies or antibody fragments, wherein the antibody is a monoclonal antibody, a polyclonal antibody, a bi-specific antibody, a multispecific antibody, a grafted antibody, a human antibody, a humanized antibody, a synthetic antibody, a chimeric antibody, a camelized antibody, a single-chain Fvs (scFv), a single chain antibody, a Fab fragment, a F(ab′)2 fragment, a Fd fragment, a Fv fragment, a single-domain antibody, an isolated complementarity determining region (CDR), a diabody, a fragment comprised of only a single monomeric variable domain, disulfide-linked Fvs (sdFv), an intrabody, an anti-idiotypic (anti-Id) antibody, or ab antigen-binding fragments thereof. Further provided herein are antibodies or antibody fragments, wherein the antibody or antibody fragment thereof is chimeric or humanized. Further provided herein are antibodies or antibody fragments, wherein the VH comprises a sequence of any one of SEQ ID NOs: 1-1628. Further provided herein are antibodies or antibody fragments, wherein the VL comprises a sequence of any one of SEQ ID NOs: 1629-2643. Further provided herein are antibodies or antibody fragments, wherein the VH comprises an amino acid sequence at least about 90% identical to any one of SEQ ID NOs: 1-301; and the VL comprises an amino acid sequence at least about 90% identical to any one of SEQ ID NOs: 1629-1811. Further provided herein are antibodies or antibody fragments, wherein the VH comprises an amino acid sequence of any one of SEQ ID NOs: 1-301; and the VL comprises an amino acid sequence of any one of SEQ ID NOs: 1629-1811. Further provided herein are antibodies or antibody fragments, wherein the VH comprises an amino acid sequence at least about 90% identical to any one of SEQ ID NOs: 302-790; and the VL comprises an amino acid sequence at least about 90% identical to any one of SEQ ID NOs: 1812-2112. Further provided herein are antibodies or antibody fragments, wherein the VH comprises an amino acid sequence of any one of SEQ ID NOs: 302-790; and the VL comprises an amino acid sequence of any one of SEQ ID NOs: 1812-2112. Further provided herein are antibodies or antibody fragments, wherein the VH comprises an amino acid sequence at least about 90% identical to any one of SEQ ID NOs: 791-1187; and the VL comprises an amino acid sequence at least about 90% identical to any one of SEQ ID NOs: 2113-2357. Further provided herein are antibodies or antibody fragments, wherein the VH comprises an amino acid sequence of any one of SEQ ID NOs: 791-1187; and the VL comprises an amino acid sequence of any one of SEQ ID NOs: 2113-2357. Further provided herein are antibodies or antibody fragments, wherein the VH comprises an amino acid sequence at least about 90% identical to any one of SEQ ID NOs: 1188-1628; and the VL comprises an amino acid sequence at least about 90% identical to any one of SEQ ID NOs: 2358-2643. Further provided herein are antibodies or antibody fragments, wherein the VH comprises an amino acid sequence of any one of SEQ ID NOs: 1188-1628; and the VL comprises an amino acid sequence of any one of SEQ ID NOs: 2358-2643.

[0006] Provided herein are antibodies or antibody fragments comprising a variable domain, heavy chain region (VH), wherein the VH comprises an amino acid sequence at least about 90% identical to any one of SEQ ID NOs: 1-1628. Further provided herein are antibodies or antibody fragments, wherein the antibody is a monoclonal antibody, a polyclonal antibody, a bi-specific antibody, a multispecific antibody, a grafted antibody, a human antibody, a humanized antibody, a synthetic antibody, a chimeric antibody, a camelized antibody, a single-chain Fvs (scFv), a single chain antibody, a Fab fragment, a F(ab′)2 fragment, a Fd fragment, a Fv fragment, a single-domain antibody, an isolated complementarity determining region (CDR), a diabody, a fragment comprised of only a single monomeric variable domain, disulfide-linked Fvs (sdFv), an intrabody, an anti-idiotypic (anti-Id) antibody, or ab antigen-binding fragments thereof. Further provided herein are antibodies or antibody fragments, wherein the antibody or antibody fragment thereof is chimeric or humanized. Further provided herein are antibodies or antibody fragments, wherein the VH comprises a sequence of any one of SEQ ID NOs: 1-1628. Further provided herein are antibodies or antibody fragments, wherein the VH comprises an amino acid sequence at least about 90% identical to any one of SEQ ID NOs: 1-301. Further provided herein are antibodies or antibody fragments, wherein the VH comprises an amino acid sequence of any one of SEQ ID NOs: 1-301. Further provided herein are antibodies or antibody fragments, wherein the VH comprises an amino acid sequence at least about 90% identical to any one of SEQ ID NOs: 302-790. Further provided herein are antibodies or antibody fragments, wherein the VH comprises an amino acid sequence of any one of SEQ ID NOs: 302-790. Further provided herein are antibodies or antibody fragments, wherein the VH comprises an amino acid sequence at least about 90% identical to any one of SEQ ID NOs: 791-1187. Further provided herein are antibodies or antibody fragments, wherein the VH comprises an amino acid sequence of any one of SEQ ID NOs: 791-1187. Further provided herein are antibodies or antibody fragments, wherein the VH comprises an amino acid sequence at least about 90% identical to any one of SEQ ID NOs: 1188-1628. Further provided herein are antibodies or antibody fragments, wherein the VH comprises an amino acid sequence of any one of SEQ ID NOs: 1188-1628.

[0007] Provided herein are antibodies or antibody fragments comprising a variable domain, light chain region (VL), wherein the VL comprises an amino acid sequence at least about 90% identical to any one of SEQ ID NOs: 1629-2643. Further provided herein are antibodies or antibody fragments, wherein the antibody is a monoclonal antibody, a polyclonal antibody, a bi-specific antibody, a multispecific antibody, a grafted antibody, a human antibody, a humanized antibody, a synthetic antibody, a chimeric antibody, a camelized antibody, a single-chain Fvs (scFv), a single chain antibody, a Fab fragment, a F(ab′)2 fragment, a Fd fragment, a Fv fragment, a single-domain antibody, an isolated complementarity determining region (CDR), a diabody, a fragment comprised of only a single monomeric variable domain, disulfide-linked Fvs (sdFv), an intrabody, an anti-idiotypic (anti-Id) antibody, or ab antigen-binding fragments thereof. Further provided herein are antibodies or antibody fragments, wherein the antibody or antibody fragment thereof is chimeric or humanized. Further provided herein are antibodies or antibody fragments, wherein the VL comprises a sequence of any one of SEQ ID NOs: 1629-2643. Further provided herein are antibodies or antibody fragments, wherein the VL comprises an amino acid sequence at least about 90% identical to any one of SEQ ID NOs: 1629-1811. Further provided herein are antibodies or antibody fragments, wherein the VL comprises an amino acid sequence of any one of SEQ ID NOs: 1629-1811. Further provided herein are antibodies or antibody fragments, wherein the VL comprises an amino acid sequence at least about 90% identical to any one of SEQ ID NOs: 1812-2112. Further provided herein are antibodies or antibody fragments, wherein the VL comprises an amino acid sequence of any one of SEQ ID NOs: 1812-2112. Further provided herein are antibodies or antibody fragments, wherein the VH comprises an amino acid sequence at least about 90% identical to any one of SEQ ID NOs: 2113-2357. Further provided herein are antibodies or antibody fragments, wherein the VH comprises an amino acid sequence of any one of SEQ ID NOs: 2113-2357. Further provided herein are antibodies or antibody fragments, wherein the VH comprises an amino acid sequence at least about 90% identical to any one of SEQ ID NOs: 2358-2643. Further provided herein are antibodies or antibody fragments, wherein the VH comprises an amino acid sequence of any one of SEQ ID NOs: 2358-2643.

[0008] Provided herein are nucleic acid compositions comprising: a) a first nucleic acid encoding a variable domain, heavy chain region (VH), wherein the VH comprises an amino acid sequence at least about 90% identical to any one of SEQ ID NOs: 1-1628; b) a second nucleic acid encoding a variable domain, light chain region (VL), wherein the VL comprises an amino acid sequence at least about 90% identical to any one of SEQ ID NOs: 1629-2643; and c) an excipient. Further provided herein are nucleic acid compositions, wherein the VH comprises a sequence of any one of SEQ ID NOs: 1-1628. Further provided herein are nucleic acid compositions, wherein the VL comprises a sequence of any one of SEQ ID NOs: 1629-2643. Further provided herein are nucleic acid compositions, wherein the VH comprises an amino acid sequence at least about 90% identical to any one of SEQ ID NOs: 1-301; and the VL comprises an amino acid sequence at least about 90% identical to any one of SEQ ID NOs: 1629-1811. Further provided herein are nucleic acid compositions, wherein the VH comprises an amino acid sequence of any one of SEQ ID NOs: 1-301; and the VL comprises an amino acid sequence of any one of SEQ ID NOs: 1629-1811. Further provided herein are nucleic acid compositions, wherein the VH comprises an amino acid sequence at least about 90% identical to any one of SEQ ID NOs: 302-790; and the VL comprises an amino acid sequence at least about 90% identical to any one of SEQ ID NOs: 1812-2112. Further provided herein are nucleic acid compositions, wherein the VH comprises an amino acid sequence of any one of SEQ ID NOs: 302-790; and the VL comprises an amino acid sequence of any one of SEQ ID NOs: 1812-2112. Further provided herein are nucleic acid compositions, wherein the VH comprises an amino acid sequence at least about 90% identical to any one of SEQ ID NOs: 791-1187; and the VL comprises an amino acid sequence at least about 90% identical to any one of SEQ ID NOs: 2113-2357. Further provided herein are nucleic acid compositions, wherein the VH comprises an amino acid sequence of any one of SEQ ID NOs: 791-1187; and the VL comprises an amino acid sequence of any one of SEQ ID NOs: 2113-2357. Further provided herein are nucleic acid compositions, wherein the VH comprises an amino acid sequence at least about 90% identical to any one of SEQ ID NOs: 1188-1628; and the VL comprises an amino acid sequence at least about 90% identical to any one of SEQ ID NOs: 2358-2643. Further provided herein are nucleic acid compositions, wherein the VH comprises an amino acid sequence of any one of SEQ ID NOs: 1188-1628; and the VL comprises an amino acid sequence of any one of SEQ ID NOs: 2358-2643.

[0009] Provided herein are nucleic acid compositions comprising: a) a first nucleic acid encoding a variable domain, heavy chain region (VH) comprising an amino acid sequence at least about 90% identical to a sequence as set forth in any one of SEQ ID NOs: 1-1628; b) a second nucleic acid encoding a variable domain, light chain region (VL) comprising at least about 90% identical to a sequence as set forth in any one of SEQ ID NOs: 1629-2643; and c) an excipient. Further provided herein are nucleic acid compositions, wherein the VH comprises a sequence of any one of SEQ ID NOs: 1-1628. Further provided herein are nucleic acid compositions, wherein the VH comprises an amino acid sequence at least about 90% identical to any one of SEQ ID NOs: 1-301. Further provided herein are nucleic acid compositions, wherein the VH comprises an amino acid sequence of any one of SEQ ID NOs: 1-301. Further provided herein are nucleic acid compositions, wherein the VH comprises an amino acid sequence at least about 90% identical to any one of SEQ ID NOs: 302-790. Further provided herein are nucleic acid compositions, wherein the VH comprises an amino acid sequence of any one of SEQ ID NOs: 302-790. Further provided herein are nucleic acid compositions, wherein the VH comprises an amino acid sequence at least about 90% identical to any one of SEQ ID NOs: 791-1187. Further provided herein are nucleic acid compositions, wherein the VH comprises an amino acid sequence of any one of SEQ ID NOs: 791-1187. Further provided herein are nucleic acid compositions, wherein the VH comprises an amino acid sequence at least about 90% identical to any one of SEQ ID NOs: 1188-1628. Further provided herein are nucleic acid compositions, wherein the VH comprises an amino acid sequence of any one of SEQ ID NOs: 1188-1628.

### BRIEF DESCRIPTION OF THE DRAWINGS

[0010] The patent or application file contains at least one drawing executed in color. Copies of this patent or patent application publication with color drawing(s) will be provided by the Office upon request and payment of the necessary fee.

[0011] FIG. 1A depicts a first schematic of an immunoglobulin.

[0012] FIG. 1B depicts a second schematic of an immunoglobulin.

[0013] FIG. 2 depicts a schematic of a motif for placement in an immunoglobulin.

[0014] FIG. 3 presents a diagram of steps demonstrating an exemplary process workflow for gene synthesis as disclosed herein.

[0015] FIG. 4 illustrates an example of a computer system.

[0016] FIG. 5 is a block diagram illustrating an architecture of a computer system.

[0017] FIG. 6 is a diagram demonstrating a network configured to incorporate a plurality of computer systems, a plurality of cell phones and personal data assistants, and Network Attached Storage (NAS).

[0018] FIG. 7 is a block diagram of a multiprocessor computer system using a shared virtual address memory space.

[0019] FIG. 8A depicts a schematic of an immunoglobulin comprising a VH domain attached to a VL domain using a linker.

[0020] FIG. 8B depicts a schematic of a full-domain architecture of an immunoglobulin comprising a VH domain attached to a VL domain using a linker, a leader sequence, and pIII sequence.

[0021] FIG. 8C depicts a schematic of four framework elements (FW1, FW2, FW3, FW4) and the variable 3 CDR (L1, L2, L3) elements for a VL or VH domain.

[0022] FIGS. 9A-9C depict results for TSLP NGS sequencing. Long-read NGS sequencing of the eluted phage pool from panning round 4. The top graph shows the cluster enrichment number plotted against the cluster rank. Cluster enrichment refers to the number of instances that the exact antibody appeared in round 4 or a variant within a Levenshtein distance of 3 appeared in round 4 sequencing. Cluster rank lists the antibody rank order of the antibody belonging to the largest size cluster enrichment to the lowest. Only the top 95 antibody clusters are listed. Green dots indicate the antibody has also been identified in ELISA screening as a phage-displayed antibody fragment. The bottom graph is a histogram showing the distribution of HCDR3 lengths among the top 95 antibody clusters. FIG. 9A corresponds to antibody library pool A, FIG. 9B corresponds to antibody library pool B, and FIG. 9C corresponds to antibody library C.

[0023] FIGS. 10A-10C depict results for IL1RL1 NGS sequencing. Long-read NGS sequencing of the eluted phage pool from panning round 4. The top graph shows the cluster enrichment number plotted against the cluster rank. Cluster enrichment refers to the number of instances that the exact antibody appeared in round 4 or a variant within a Levenshtein distance of 3 appeared in round 4 sequencing. Cluster rank lists the antibody rank order of the antibody belonging to the largest size cluster enrichment to the lowest. Only the top 95 antibody clusters are listed. Green dots indicate the antibody has also been identified in ELISA screening as a phage-displayed antibody fragment. The bottom graph is a histogram showing the distribution of HCDR3 lengths among the top 95 antibody clusters. FIG. 10A corresponds to antibody library pool A, FIG. 10B corresponds to antibody library pool B, and FIG. 10C corresponds to antibody library C.

[0024] FIGS. 11A-11C depict results for IL1RL2 NGS sequencing. Long-read NGS sequencing of the eluted phage pool from panning round 4. The top graph shows the cluster enrichment number plotted against the cluster rank. Cluster enrichment refers to the number of instances that the exact antibody appeared in round 4 or a variant within a Levenshtein distance of 3 appeared in round 4 sequencing. Cluster rank lists the antibody rank order of the antibody belonging to the largest size cluster enrichment to the lowest. Only the top 95 antibody clusters are listed. Green dots indicate the antibody has also been identified in ELISA screening as a phage-displayed antibody fragment. The bottom graph is a histogram showing the distribution of HCDR3 lengths among the top 95 antibody clusters. FIG. 11A corresponds to antibody library pool A, FIG. 11B corresponds to antibody library pool B, and FIG. 11C corresponds to antibody library C.

[0025] FIGS. 12A-12C depict results for CD40L NGS sequencing. Long-read NGS sequencing of the eluted phage pool from panning round 4. The top graph shows the cluster enrichment number plotted against the cluster rank. Cluster enrichment refers to the number of instances that the exact antibody appeared in round 4 or a variant within a Levenshtein distance of 3 appeared in round 4 sequencing. Cluster rank lists the antibody rank order of the antibody belonging to the largest size cluster enrichment to the lowest. Only the top 95 antibody clusters are listed. Green dots indicate the antibody has also been identified in ELISA screening as a phage-displayed antibody fragment. The bottom graph is a histogram showing the distribution of HCDR3 lengths among the top 95 antibody clusters. FIG. 12A corresponds to antibody library pool A, FIG. 12B corresponds to antibody library pool B, and FIG. 12C corresponds to antibody library C.

[0026] FIG. 13A depicts swarm plot showing distribution of CD40L antibody yields (in micrograms) from 1.2 ml transient transfection in HEK Expi293 cells (Thermo Fisher Scientific) from antibodies identified by ELISA screening (blue) or NGS enrichment (orange). Antibodies are further differentiated by the library (Y axis).

[0027] FIG. 13B depicts swarm plot showing distribution of apparent binding affinities as measured by SPR on Carterra LSA instrumentation. CD40L antibodies tested were by ELISA screening (blue) or NGS enrichment (orange). Antibodies are further differentiated by the library (Y axis).

[0028] FIG. 13C depicts swarm plot showing distribution of flow cytometry binding assay as measured by the mean fluorescence intensity (MFI) of the cytokine over-expressing HEK293 cell divided by the MFI of the HEK293 parent cell. CD40L antibodies tested were by ELISA screening (blue) or NGS enrichment (orange). Antibodies are further differentiated by the library (Y axis).

[0029] FIG. 14 depicts a scatter plot showing the relationship of MFI ratio at 100 nM CD40L antibody compared to the apparent affinity as measured by SPR. The size of the dot shows the yield (in micrograms) from a 1.2 ml small-scale expression in Expi293.

[0030] FIG. 15A depicts swarm plot showing distribution of TSLP antibody yields (in micrograms) from 1.2 ml transient transfection in HEK Expi293 cells (Thermo Fisher Scientific) from antibodies identified by ELISA screening (blue) or NGS enrichment (orange). Antibodies are further differentiated by the library (Y axis).

[0031] FIG. 15B depicts swarm plot showing distribution of apparent binding affinities as measured by SPR on Carterra LSA instrumentation. TSLP antibodies tested were by ELISA screening (blue) or NGS enrichment (orange). Antibodies are further differentiated by the library (Y axis).

[0032] FIG. 15C depicts swarm plot showing distribution of flow cytometry binding assay as measured by the mean fluorescence intensity (MFI) of the cytokine over-expressing HEK293 cell divided by the MFI of the HEK293 parent cell. TSLP antibodies tested were by ELISA screening (blue) or NGS enrichment (orange). Antibodies are further differentiated by the library (Y axis).

[0033] FIG. 16A-16B depict scatter plots showing the relationship of MFI ratio at 100 nM TSLP antibody compared to the apparent affinity as measured by SPR. The size of the dot shows the yield (in micrograms) from a 1.2 ml small-scale expression in Expi293.

[0034] FIG. 17A depicts swarm plot showing distribution of IL1RL1 antibody yields (in micrograms) from 1.2 ml transient transfection in HEK Expi293 cells (Thermo Fisher Scientific) from antibodies identified by ELISA screening (blue) or NGS enrichment (orange). Antibodies are further differentiated by the library (Y axis).

[0035] FIG. 17B depicts swarm plot showing distribution of apparent binding affinities as measured by SPR on Carterra LSA instrumentation. IL1RL1 antibodies tested were by ELISA screening (blue) or NGS enrichment (orange). Antibodies are further differentiated by the library (Y axis).

[0036] FIG. 17C depicts swarm plot showing distribution of flow cytometry binding assay as measured by the mean fluorescence intensity (MFI) of the cytokine over-expressing HEK293 cell divided by the MFI of the HEK293 parent cell. IL1RL1 antibodies tested were by ELISA screening (blue) or NGS enrichment (orange). Antibodies are further differentiated by the library (Y axis).

[0037] FIG. 18 depicts a scatter plot showing the relationship of MFI ratio at 100 nM IL1RL1 antibody compared to the apparent affinity as measured by SPR. The size of the dot shows the yield (in micrograms) from a 1.2 ml small-scale expression in Expi293.

[0038] FIG. 19A depicts swarm plot showing distribution of IL1RL2 antibody yields (in micrograms) from 1.2 ml transient transfection in HEK Expi293 cells (Thermo Fisher Scientific) from antibodies identified by ELISA screening (blue) or NGS enrichment (orange). Antibodies are further differentiated by the library (Y axis).

[0039] FIG. 19B depicts swarm plot showing distribution of apparent binding affinities as measured by SPR on Carterra LSA instrumentation. IL1RL2 antibodies tested were by ELISA screening (blue) or NGS enrichment (orange). Antibodies are further differentiated by the library (Y axis).

[0040] FIG. 19C depicts swarm plot showing distribution of flow cytometry binding assay as measured by the mean fluorescence intensity (MFI) of the cytokine over-expressing HEK293 cell divided by the MFI of the HEK293 parent cell. IL1RL2 antibodies tested were by ELISA screening (blue) or NGS enrichment (orange). Antibodies are further differentiated by the library (Y axis).

[0041] FIG. 20 depicts a scatter plot showing the relationship of MFI ratio at 100 nM IL1RL2 antibody compared to the apparent affinity as measured by SPR. The size of the dot shows the yield (in micrograms) from a 1.2 ml small-scale expression in Expi293.

### DETAILED DESCRIPTION

[0042] The present disclosure employs, unless otherwise indicated, conventional molecular biology techniques, which are within the skill of the art. Unless defined otherwise, all technical and scientific terms used herein have the same meaning as is commonly understood by one of ordinary skill in the art.

### Definitions

[0043] Throughout this disclosure, various embodiments are presented in a range format. It should be understood that the description in range format is merely for convenience and brevity and should not be construed as an inflexible limitation on the scope of any embodiments. Accordingly, the description of a range should be considered to have specifically disclosed all the possible subranges as well as individual numerical values within that range to the tenth of the unit of the lower limit unless the context clearly dictates otherwise. For example, description of a range such as from 1 to 6 should be considered to have specifically disclosed subranges such as from 1 to 3, from 1 to 4, from 1 to 5, from 2 to 4, from 2 to 6, from 3 to 6 etc., as well as individual values within that range, for example, 1.1, 2, 2.3, 5, and 5.9. This applies regardless of the breadth of the range. The upper and lower limits of these intervening ranges may independently be included in the smaller ranges, and are also encompassed within the disclosure, subject to any specifically excluded limit in the stated range. Where the stated range includes one or both of the limits, ranges excluding either or both of those included limits are also included in the disclosure, unless the context clearly dictates otherwise.

[0044] The terminology used herein is for the purpose of describing particular embodiments only and is not intended to be limiting of any embodiment. As used herein, the singular forms “a,” “an” and “the” are intended to include the plural forms as well, unless the context clearly indicates otherwise. It will be further understood that the terms “comprises” and/or “comprising,” when used in this specification, specify the presence of stated features, integers, steps, operations, elements, components, and/or groups, but do not preclude the presence or addition of one or more other features, integers, steps, operations, elements, components, and/or groups thereof. As used herein, the term “and/or” includes any and all combinations of one or more of the associated listed items.

[0045] Unless specifically stated or obvious from context, as used herein, the term “about” in reference to a number or range of numbers is understood to mean the stated number and numbers +/−10% thereof, or 10% below the lower listed limit and 10% above the higher listed limit for the values listed for a range.

[0046] Unless specifically stated, as used herein, the term “nucleic acid” encompasses double- or triple-stranded nucleic acids, as well as single-stranded molecules. In double- or triple-stranded nucleic acids, the nucleic acid strands need not be coextensive (i.e., a double-stranded nucleic acid need not be double-stranded along the entire length of both strands). Nucleic acid sequences, when provided, are listed in the 5′ to 3′ direction, unless stated otherwise. Methods described herein provide for the generation of isolated nucleic acids. Methods described herein additionally provide for the generation of isolated and purified nucleic acids. A “nucleic acid” as referred to herein can comprise at least 5, 10, 20, 30, 40, 50, 60, 70, 80, 90, 100, 125, 150, 175, 200, 225, 250, 275, 300, 325, 350, 375, 400, 425, 450, 475, 500, 600, 700, 800, 900, 1000, 1100, 1200, 1300, 1400, 1500, 1600, 1700, 1800, 1900, 2000, or more bases in length. Moreover, provided herein are methods for the synthesis of any number of polypeptide-segments encoding nucleotide sequences, including sequences encoding non-ribosomal peptides (NRPs), sequences encoding non-ribosomal peptide-synthetase (NRPS) modules and synthetic variants, polypeptide segments of other modular proteins, such as antibodies, polypeptide segments from other protein families, including non-coding DNA or RNA, such as regulatory sequences e.g. promoters, transcription factors, enhancers, siRNA, shRNA, RNAi, miRNA, small nucleolar RNA derived from microRNA, or any functional or structural DNA or RNA unit of interest. The following are non-limiting examples of polynucleotides: coding or non-coding regions of a gene or gene fragment, intergenic DNA, loci (locus) defined from linkage analysis, exons, introns, messenger RNA (mRNA), transfer RNA, ribosomal RNA, short interfering RNA (siRNA), short-hairpin RNA (shRNA), micro-RNA (miRNA), small nucleolar RNA, ribozymes, complementary DNA (cDNA), which is a DNA representation of mRNA, usually obtained by reverse transcription of messenger RNA (mRNA) or by amplification; DNA molecules produced synthetically or by amplification, genomic DNA, recombinant polynucleotides, branched polynucleotides, plasmids, vectors, isolated DNA of any sequence, isolated RNA of any sequence, nucleic acid probes, and primers. cDNA encoding for a gene or gene fragment referred herein may comprise at least one region encoding for exon sequences without an intervening intron sequence in the genomic equivalent sequence.

[0047] Cytokine Libraries

[0048] Provided herein are methods and compositions relating to cytokine variant immunoglobulins (e.g., CD40L, TSLP, ILIRL1, IL1RL2) comprising nucleic acids encoding for an immunoglobulin comprising a cytokine binding domain. Immunoglobulins as described herein can stably support a cytokine binding domain. Libraries as described herein may be further variegated to provide for variant libraries comprising nucleic acids each encoding for a predetermined variant of at least one predetermined reference nucleic acid sequence. Further described herein are protein libraries that may be generated when the nucleic acid libraries are translated. In some instances, nucleic acid libraries as described herein are transferred into cells to generate a cell library. Also provided herein are downstream applications for the libraries synthesized using methods described herein. Downstream applications include identification of variant nucleic acids or protein sequences with enhanced biologically relevant functions, e.g., improved stability, affinity, binding, functional activity, and for the treatment or prevention of a disease state associated with cytokine.

[0049] Provided herein are libraries comprising nucleic acids encoding for an immunoglobulin. In some instances, the immunoglobulin is an antibody. As used herein, the term antibody will be understood to include proteins having the characteristic two-armed, Y-shape of a typical antibody molecule as well as one or more fragments of an antibody that retain the ability to specifically bind to an antigen. Exemplary antibodies include, but are not limited to, a monoclonal antibody, a polyclonal antibody, a bi-specific antibody, a multispecific antibody, a grafted antibody, a human antibody, a humanized antibody, a synthetic antibody, a chimeric antibody, a camelized antibody, a single-chain Fvs (scFv) (including fragments in which the VL and VH are joined using recombinant methods by a synthetic or natural linker that enables them to be made as a single protein chain in which the VL and VH regions pair to form monovalent molecules, including single chain Fab and scFab), a single chain antibody, a Fab fragment (including monovalent fragments comprising the VL, VH, CL, and CHI domains), a F(ab′)2 fragment (including bivalent fragments comprising two Fab fragments linked by a disulfide bridge at the hinge region), a Fd fragment (including fragments comprising the VH and CHI fragment), a Fv fragment (including fragments comprising the VL and VH domains of a single arm of an antibody), a single-domain antibody (dAb or sdAb) (including fragments comprising a VH domain), an isolated complementarity determining region (CDR), a diabody (including fragments comprising bivalent dimers such as two VL and VH domains bound to each other and recognizing two different antigens), a fragment comprised of only a single monomeric variable domain, disulfide-linked Fvs (sdFv), an intrabody, an anti-idiotypic (anti-Id) antibody, or ab antigen-binding fragments thereof. In some instances, the libraries disclosed herein comprise nucleic acids encoding for an immunoglobulin, wherein the immunoglobulin is a Fv antibody, including Fv antibodies comprised of the minimum antibody fragment which contains a complete antigen-recognition and antigen-binding site. In some embodiments, the Fv antibody consists of a dimer of one heavy chain and one light chain variable domain in tight, non-covalent association, and the three hypervariable regions of each variable domain interact to define an antigen-binding site on the surface of the VH-VL dimer. In some embodiments, the six hypervariable regions confer antigen-binding specificity to the antibody. In some embodiments, a single variable domain (or half of an Fv comprising only three hypervariable regions specific for an antigen, including single domain antibodies isolated from camelid animals comprising one heavy chain variable domain such as VHH antibodies or nanobodies) has the ability to recognize and bind antigen. In some instances, the libraries disclosed herein comprise nucleic acids encoding for an immunoglobulin, wherein the immunoglobulin is a single-chain Fv or scFv, including antibody fragments comprising a VH, a VL, or both a VH and VL domain, wherein both domains are present in a single polypeptide chain. In some embodiments, the Fv polypeptide further comprises a polypeptide linker between the VH and VL domains allowing the scFv to form the desired structure for antigen binding. In some instances, a scFv is linked to the Fc fragment or a VHH is linked to the Fc fragment (including minibodies). In some instances, the antibody comprises immunoglobulin molecules and immunologically active fragments of immunoglobulin molecules, e.g., molecules that contain an antigen binding site. Immunoglobulin molecules are of any type (e.g., IgG, IgE, IgM, IgD, IgA and IgY), class (e.g., IgG 1, IgG 2, IgG 3, IgG 4, IgA 1 and IgA 2), or subclass.

[0050] In some embodiments, libraries comprise immunoglobulins that are adapted to the species of an intended therapeutic target. Generally, these methods include “mammalization” and comprise methods for transferring donor antigen-binding information to a less immunogenic mammal antibody acceptor to generate useful therapeutic treatments. In some instances, the mammal is mouse, rat, equine, sheep, cow, primate (e.g., chimpanzee, baboon, gorilla, orangutan, monkey), dog, cat, pig, donkey, rabbit, or human. In some instances, provided herein are libraries and methods for felinization and caninization of antibodies.

[0051] “Humanized” forms of non-human antibodies can be chimeric antibodies that contain minimal sequence derived from the non-human antibody. A humanized antibody is generally a human antibody (recipient antibody) in which residues from one or more CDRs are replaced by residues from one or more CDRs of a non-human antibody (donor antibody). The donor antibody can be any suitable non-human antibody, such as a mouse, rat, rabbit, chicken, or non-human primate antibody having a desired specificity, affinity, or biological effect. In some instances, selected framework region residues of the recipient antibody are replaced by the corresponding framework region residues from the donor antibody. Humanized antibodies may also comprise residues that are not found in either the recipient antibody or the donor antibody. In some instances, these modifications are made to further refine antibody performance.

[0052] “Caninization” can comprise a method for transferring non-canine antigen-binding information from a donor antibody to a less immunogenic canine antibody acceptor to generate treatments useful as therapeutics in dogs. In some instances, caninized forms of non-canine antibodies provided herein are chimeric antibodies that contain minimal sequence derived from non-canine antibodies. In some instances, caninized antibodies are canine antibody sequences (“acceptor” or “recipient” antibody) in which hypervariable region residues of the recipient are replaced by hypervariable region residues from a non-canine species (“donor” antibody) such as mouse, rat, rabbit, cat, dogs, goat, chicken, bovine, horse, llama, camel, dromedaries, sharks, non-human primates, human, humanized, recombinant sequence, or an engineered sequence having the desired properties. In some instances, framework region (FR) residues of the canine antibody are replaced by corresponding non-canine FR residues. In some instances, caninized antibodies include residues that are not found in the recipient antibody or in the donor antibody. In some instances, these modifications are made to further refine antibody performance. The caninized antibody may also comprise at least a portion of an immunoglobulin constant region (Fc) of a canine antibody.

[0053] “Felinization” can comprise a method for transferring non-feline antigen-binding information from a donor antibody to a less immunogenic feline antibody acceptor to generate treatments useful as therapeutics in cats. In some instances, felinized forms of non-feline antibodies provided herein are chimeric antibodies that contain minimal sequence derived from non-feline antibodies. In some instances, felinized antibodies are feline antibody sequences (“acceptor” or “recipient” antibody) in which hypervariable region residues of the recipient are replaced by hypervariable region residues from a non-feline species (“donor” antibody) such as mouse, rat, rabbit, cat, dogs, goat, chicken, bovine, horse, llama, camel, dromedaries, sharks, non-human primates, human, humanized, recombinant sequence, or an engineered sequence having the desired properties. In some instances, framework region (FR) residues of the feline antibody are replaced by corresponding non-feline FR residues. In some instances, felinized antibodies include residues that are not found in the recipient antibody or in the donor antibody. In some instances, these modifications are made to further refine antibody performance. The felinized antibody may also comprise at least a portion of an immunoglobulin constant region (Fc) of a felinize antibody.

[0054] Provided herein are libraries comprising nucleic acids encoding for a non-immunoglobulin. For example, the non-immunoglobulin is an antibody mimetic. Exemplary antibody mimetics include, but are not limited to, anticalins, affilins, affibody molecules, affimers, affitins, alphabodies, avimers, atrimers, DARPins, fynomers, Kunitz domain-based proteins, monobodies, anticalins, knottins, armadillo repeat protein-based proteins, and bicyclic peptides.

[0055] Libraries described herein comprising nucleic acids encoding for an immunoglobulin comprising variations in at least one region of the immunoglobulin. Exemplary regions of the antibody for variation include, but are not limited to, a complementarity-determining region (CDR), a variable domain, or a constant domain. In some instances, the CDR is CDR1, CDR2, or CDR3. In some instances, the CDR is a heavy domain including, but not limited to, CDRH1, CDRH2, and CDRH3. In some instances, the CDR is a light domain including, but not limited to, CDRL1, CDRL2, and CDRL3. In some instances, the variable domain is variable domain, light chain (VL) or variable domain, heavy chain (VH). In some instances, the VL domain comprises kappa or lambda chains. In some instances, the constant domain is constant domain, light chain (CL) or constant domain, heavy chain (CH).

[0056] Methods described herein provide for synthesis of libraries comprising nucleic acids encoding for an immunoglobulin, wherein each nucleic acid encodes for a predetermined variant of at least one predetermined reference nucleic acid sequence. In some cases, the predetermined reference sequence is a nucleic acid sequence encoding for a protein, and the variant library comprises sequences encoding for variation of at least a single codon such that a plurality of different variants of a single residue in the subsequent protein encoded by the synthesized nucleic acid are generated by standard translation processes. In some instances, the variant library comprises varied nucleic acids collectively encoding variations at multiple positions. In some instances, the variant library comprises sequences encoding for variation of at least a single codon of a CDRH1, CDRH2, CDRH3, CDRL1, CDRL2, CDRL3, VL, or VH domain. In some instances, the variant library comprises sequences encoding for variation of multiple codons of a CDRH1, CDRH2, CDRH3, CDRL1, CDRL2, CDRL3, VL, or VH domain. In some instances, the variant library comprises sequences encoding for variation of multiple codons of framework element 1 (FW1), framework element 2 (FW2), framework element 3 (FW3), or framework element 4 (FW4). An exemplary number of codons for variation include, but are not limited to, at least or about 1, 5, 10, 15, 20, 25, 30, 35, 40, 45, 50, 55, 60, 65, 70, 75, 80, 85, 90, 95, 100, 125, 150, 175, 225, 250, 275, 300, or more than 300 codons.

[0057] In some instances, the at least one region of the immunoglobulin for variation is from heavy chain V-gene family, heavy chain D-gene family, heavy chain J-gene family, light chain V-gene family, or light chain J-gene family. In some instances, the light chain V-gene family comprises immunoglobulin kappa (IGK) gene or immunoglobulin lambda (IGL). Exemplary genes include, but are not limited to, IGHV1-18, IGHV1-69, IGHV1-8, IGHV3-21, IGHV3-23, IGHV3-30/33rn, IGHV3-28, IGHV1-69, IGHV3-74, IGHV4-39, IGHV4-59/61, IGKV1-39, IGKV1-9, IGKV2-28, IGKV3-11, IGKV3-15, IGKV3-20, IGKV4-1, IGLV1-51, IGLV2-14, IGLV1-40, and IGLV3-1. In some instances, the gene is IGHV1-69, IGHV3-30, IGHV3-23, IGHV3, IGHV1-46, IGHV3-7, IGHV1, or IGHV1-8. In some instances, the gene is IGHV1-69 and IGHV3-30. In some instances, the gene is IGHJ3, IGHJ6, IGHJ, IGHJ4, IGHJS, IGHJ2, or IGH1. In some instances, the gene is IGHJ3, IGHJ6, IGHJ, or IGHJ4.

[0058] Provided herein are libraries comprising nucleic acids encoding for immunoglobulins, wherein the libraries are synthesized with various numbers of fragments. In some instances, the fragments comprise the CDRH1, CDRH2, CDRH3, CDRL1, CDRL2, CDRL3, VL, or VH domain. In some instances, the fragments comprise framework element 1 (FW1), framework element 2 (FW2), framework element 3 (FW3), or framework element 4 (FW4). In some instances, the immunoglobulin libraries are synthesized with at least or about 2 fragments, 3 fragments, 4 fragments, 5 fragments, or more than 5 fragments. The length of each of the nucleic acid fragments or average length of the nucleic acids synthesized may be at least or about 50, 75, 100, 125, 150, 175, 200, 225, 250, 275, 300, 325, 350, 375, 400, 425, 450, 475, 500, 525, 550, 575, 600, or more than 600 base pairs. In some instances, the length is about 50 to 600, 75 to 575, 100 to 550, 125 to 525, 150 to 500, 175 to 475, 200 to 450, 225 to 425, 250 to 400, 275 to 375, or 300 to 350 base pairs.

[0059] Libraries comprising nucleic acids encoding for immunoglobulins as described herein comprise various lengths of amino acids when translated. In some instances, the length of each of the amino acid fragments or average length of the amino acid synthesized may be at least or about 15, 20, 25, 30, 35, 40, 45, 50, 55, 60, 65, 70, 75, 80, 85, 90, 95, 100, 105, 110, 115, 120, 125, 130, 135, 140, 145, 150, or more than 150 amino acids. In some instances, the length of the amino acid is about 15 to 150, 20 to 145, 25 to 140, 30 to 135, 35 to 130, 40 to 125, 45 to 120, 50 to 115, 55 to 110, 60 to 110, 65 to 105, 70 to 100, or 75 to 95 amino acids. In some instances, the length of the amino acid is about 22 amino acids to about 75 amino acids. In some instances, the immunoglobulins comprise at least or about 100, 200, 300, 400, 500, 600, 700, 800, 900, 1000, 2000, 3000, 4000, 5000, or more than 5000 amino acids.

[0060] A number of variant sequences for the at least one region of the immunoglobulin for variation are de novo synthesized using methods as described herein. In some instances, a number of variant sequences is de novo synthesized for CDRH1, CDRH2, CDRH3, CDRL1, CDRL2, CDRL3, VL, VH, or combinations thereof. In some instances, a number of variant sequences is de novo synthesized for framework element 1 (FW1), framework element 2 (FW2), framework element 3 (FW3), or framework element 4 (FW4). The number of variant sequences may be at least or about 5, 10, 15, 20, 25, 30, 35, 40, 45, 50, 55, 60, 65, 70, 75, 80, 85, 90, 95, 100, 125, 150, 175, 200, 225, 250, 275, 300, 325, 350, 375, 400, 425, 450, 475, 500, or more than 500 sequences. In some instances, the number of variant sequences is at least or about 500, 600, 700, 800, 900, 1000, 2000, 3000, 4000, 5000, 6000, 7000, 8000, or more than 8000 sequences. In some instances, the number of variant sequences is about 10 to 500, 25 to 475, 50 to 450, 75 to 425, 100 to 400, 125 to 375, 150 to 350, 175 to 325, 200 to 300, 225 to 375, 250 to 350, or 275 to 325 sequences.

[0061] Variant sequences for the at least one region of the immunoglobulin, in some instances, vary in length or sequence. In some instances, the at least one region that is de novo synthesized is for CDRH1, CDRH2, CDRH3, CDRL1, CDRL2, CDRL3, VL, VH, or combinations thereof. In some instances, the at least one region that is de novo synthesized is for framework element 1 (FW1), framework element 2 (FW2), framework element 3 (FW3), or framework element 4 (FW4). In some instances, the variant sequence comprises at least or about 1, 2, 3, 4, 5, 6, 7, 8, 9, 10, 15, 20, 25, 30, 35, 40, 45, 50, or more than 50 variant nucleotides or amino acids as compared to wild-type. In some instances, the variant sequence comprises at least or about 1, 2, 3, 4, 5, 6, 7, 8, 9, 10, 15, 20, 25, 30, 35, 40, 45, or 50 additional nucleotides or amino acids as compared to wild-type. In some instances, the variant sequence comprises at least or about 1, 2, 3, 4, 5, 6, 7, 8, 9, 10, 15, 20, 25, 30, 35, 40, 45, or 50 less nucleotides or amino acids as compared to wild-type. In some instances, the libraries comprise at least or about 10¹, 10², 10³, 10⁴, 10⁵, 10⁶, 10⁷, 10⁸, 10⁹, 10¹⁰, or more than 10¹⁰ variants.

[0062] Following synthesis of libraries described herein, libraries may be used for screening and analysis. For example, libraries are assayed for library displayability and panning. In some instances, displayability is assayed using a selectable tag. Exemplary tags include, but are not limited to, a radioactive label, a fluorescent label, an enzyme, a chemiluminescent tag, a colorimetric tag, an affinity tag or other labels or tags that are known in the art. In some instances, the tag is histidine, polyhistidine, myc, hemagglutinin (HA), or FLAG. In some instances, libraries are assayed by sequencing using various methods including, but not limited to, single-molecule real-time (SMRT) sequencing, Polony sequencing, sequencing by ligation, reversible terminator sequencing, proton detection sequencing, ion semiconductor sequencing, nanopore sequencing, electronic sequencing, pyrosequencing, Maxam-Gilbert sequencing, chain termination (e.g., Sanger) sequencing, +S sequencing, or sequencing by synthesis.

[0063] In some instances, the libraries are assayed for functional activity, structural stability (e.g., thermal stable or pH stable), expression, specificity, or a combination thereof. In some instances, the libraries are assayed for immunoglobulin (e.g., an antibody) capable of folding. In some instances, a region of the antibody is assayed for functional activity, structural stability, expression, specificity, folding, or a combination thereof. For example, a VH region or VL region is assayed for functional activity, structural stability, expression, specificity, folding, or a combination thereof.

[0064] Provided herein are cytokine variant immunoglobulins (e.g., CD40L, TSLP, ILIRL1, IL1RL2) comprising nucleic acids encoding for immunoglobulins (e.g., antibodies) that bind to a cytokine. In some instances, the immunoglobulin sequences for cytokine binding domains are determined by interactions between the cytokine binding domains and the cytokine.

[0065] Sequences of cytokine binding domains based on surface interactions of cytokines are analyzed using various methods. For example, multispecies computational analysis is performed. In some instances, a structure analysis is performed. In some instances, a sequence analysis is performed. Sequence analysis can be performed using a database known in the art. Non-limiting examples of databases include, but are not limited to, NCBI BLAST (blast.ncbi.nlm.nih.gov/Blast.cgi), UCSC Genome Browser (genome.ucsc.edu/), UniProt (www.uniprot.org/), and IUPHAR/BPS Guide to PHARMACOLOGY (guidetopharmacology.org/).

[0066] Described herein are cytokine binding domains designed based on sequence analysis among various organisms. For example, sequence analysis is performed to identify homologous sequences in different organisms. Exemplary organisms include, but are not limited to, mouse, rat, equine, sheep, cow, primate (e.g., chimpanzee, baboon, gorilla, orangutan, monkey), dog, cat, pig, donkey, rabbit, fish, fly, and human.

[0067] Following identification of cytokine binding domains, libraries comprising nucleic acids encoding for the cytokine binding domains may be generated. In some instances, libraries of cytokine binding domains comprise sequences of cytokine binding domains designed based on conformational ligand interactions, peptide ligand interactions, small molecule ligand interactions, extracellular domains of cytokine, or antibodies that target cytokine. In some instances, libraries of cytokine binding domains comprise sequences of cytokine binding domains designed based on peptide ligand interactions. Libraries of cytokine binding domains may be translated to generate protein libraries. In some instances, libraries of cytokine binding domains are translated to generate peptide libraries, immunoglobulin libraries, derivatives thereof, or combinations thereof. In some instances, libraries of cytokine binding domains are translated to generate protein libraries that are further modified to generate peptidomimetic libraries. In some instances, libraries of cytokine binding domains are translated to generate protein libraries that are used to generate small molecules.

[0068] Methods described herein provide for synthesis of libraries of cytokine binding domains comprising nucleic acids each encoding for a predetermined variant of at least one predetermined reference nucleic acid sequence. In some cases, the predetermined reference sequence is a nucleic acid sequence encoding for a protein, and the variant library comprises sequences encoding for variation of at least a single codon such that a plurality of different variants of a single residue in the subsequent protein encoded by the synthesized nucleic acid are generated by standard translation processes. In some instances, the libraries of cytokine binding domains comprise varied nucleic acids collectively encoding variations at multiple positions. In some instances, the variant library comprises sequences encoding for variation of at least a single codon in a cytokine binding domain. In some instances, the variant library comprises sequences encoding for variation of multiple codons in a cytokine binding domain. An exemplary number of codons for variation include, but are not limited to, at least or about 1, 5, 10, 15, 20, 25, 30, 35, 40, 45, 50, 55, 60, 65, 70, 75, 80, 85, 90, 95, 100, 125, 150, 175, 225, 250, 275, 300, or more than 300 codons.

[0069] Methods described herein provide for synthesis of libraries comprising nucleic acids encoding for the cytokine binding domains, wherein the libraries comprise sequences encoding for variation of length of the cytokine binding domains. In some instances, the library comprises sequences encoding for variation of length of at least or about 1, 5, 10, 15, 20, 25, 30, 35, 40, 45, 50, 55, 60, 65, 70, 75, 80, 85, 90, 95, 100, 125, 150, 175, 225, 250, 275, 300, or more than 300 codons less as compared to a predetermined reference sequence. In some instances, the library comprises sequences encoding for variation of length of at least or about 1, 5, 10, 15, 20, 25, 30, 35, 40, 45, 50, 55, 60, 65, 70, 75, 80, 85, 90, 95, 100, 125, 150, 175, 200, 225, 250, 275, 300, or more than 300 codons more as compared to a predetermined reference sequence.

[0070] Provided herein are cytokine variant immunoglobulins (e.g., CD40L, TSLP, IL1RL1, IL1RL2) comprising nucleic acids encoding for immunoglobulins comprising cytokine binding domains comprise variation in domain type, domain length, or residue variation. In some instances, the domain is a region in the immunoglobulin comprising the cytokine binding domains. For example, the region is the VH or VL domain. In some instances, the domain is the cytokine binding domain.

[0071] Methods described herein provide for synthesis of a cytokine binding library of nucleic acids each encoding for a predetermined variant of at least one predetermined reference nucleic acid sequence. In some cases, the predetermined reference sequence is a nucleic acid sequence encoding for a protein, and the variant library comprises sequences encoding for variation of at least a single codon such that a plurality of different variants of a single residue in the subsequent protein encoded by the synthesized nucleic acid are generated by standard translation processes. In some instances, the cytokine binding library comprises varied nucleic acids collectively encoding variations at multiple positions. In some instances, the variant library comprises sequences encoding for variation of at least a single codon of a VH or VL domain. In some instances, the variant library comprises sequences encoding for variation of at least a single codon in a cytokine binding domain. In some instances, the variant library comprises sequences encoding for variation of multiple codons of a VH or VL domain. In some instances, the variant library comprises sequences encoding for variation of multiple codons in a cytokine binding domain. An exemplary number of codons for variation include, but are not limited to, at least or about 1, 5, 10, 15, 20, 25, 30, 35, 40, 45, 50, 55, 60, 65, 70, 75, 80, 85, 90, 95, 100, 125, 150, 175, 225, 250, 275, 300, or more than 300 codons.

[0072] Methods described herein provide for synthesis of a cytokine binding library of nucleic acids each encoding for a predetermined variant of at least one predetermined reference nucleic acid sequence, wherein the cytokine binding library comprises sequences encoding for variation of length of a domain. In some instances, the domain is a VH or VL domain. In some instances, the domain is the cytokine binding domain. In some instances, the library comprises sequences encoding for variation of length of at least or about 1, 5, 10, 15, 20, 25, 30, 35, 40, 45, 50, 55, 60, 65, 70, 75, 80, 85, 90, 95, 100, 125, 150, 175, 225, 250, 275, 300, or more than 300 codons less as compared to a predetermined reference sequence. In some instances, the library comprises sequences encoding for variation of length of at least or about 1, 5, 10, 15, 20, 25, 30, 35, 40, 45, 50, 55, 60, 65, 70, 75, 80, 85, 90, 95, 100, 125, 150, 175, 200, 225, 250, 275, 300, or more than 300 codons more as compared to a predetermined reference sequence.

[0073] Provided herein are cytokine variant immunoglobulins ((e.g., CD40L, TSLP, ILIRL1, IL1RL2)) comprising nucleic acids encoding for immunoglobulins comprising cytokine binding domains, wherein the cytokine binding libraries are synthesized with various numbers of fragments. In some instances, the fragments comprise the VH or VL domain. In some instances, the cytokine variant immunoglobulins (e.g., CD40L, TSLP, IL1RL1, IL1RL2) are synthesized with at least or about 2 fragments, 3 fragments, 4 fragments, 5 fragments, or more than 5 fragments. The length of each of the nucleic acid fragments or average length of the nucleic acids synthesized may be at least or about 50, 75, 100, 125, 150, 175, 200, 225, 250, 275, 300, 325, 350, 375, 400, 425, 450, 475, 500, 525, 550, 575, 600, or more than 600 base pairs. In some instances, the length is about 50 to 600, 75 to 575, 100 to 550, 125 to 525, 150 to 500, 175 to 475, 200 to 450, 225 to 425, 250 to 400, 275 to 375, or 300 to 350 base pairs.

[0074] Cytokine variant immunoglobulins (e.g., CD40L, TSLP, IL1RL1, IL1RL2) comprising nucleic acids encoding for immunoglobulins comprising cytokine binding domains as described herein comprise various lengths of amino acids when translated. In some instances, the length of each of the amino acid fragments or average length of the amino acid synthesized may be at least or about 15, 20, 25, 30, 35, 40, 45, 50, 55, 60, 65, 70, 75, 80, 85, 90, 95, 100, 105, 110, 115, 120, 125, 130, 135, 140, 145, 150, or more than 150 amino acids. In some instances, the length of the amino acid is about 15 to 150, 20 to 145, 25 to 140, 30 to 135, 35 to 130, 40 to 125, 45 to 120, 50 to 115, 55 to 110, 60 to 110, 65 to 105, 70 to 100, or 75 to 95 amino acids. In some instances, the length of the amino acid is about 22 to about 75 amino acids.

[0075] Cytokine variant immunoglobulins (e.g., CD40L, TSLP, IL1RL1, IL1RL2) comprising de novo synthesized variant sequences encoding for immunoglobulins comprising cytokine binding domains comprise a number of variant sequences. In some instances, a number of variant sequences is de novo synthesized for a CDRH1, CDRH2, CDRH3, CDRL1, CDRL2, CDRL3, VL, VH, or a combination thereof. In some instances, a number of variant sequences is de novo synthesized for framework element 1 (FW1), framework element 2 (FW2), framework element 3 (FW3), or framework element 4 (FW4). In some instances, a number of variant sequences is de novo synthesized for a GPCR binding domain. For example, the number of variant sequences is about 1 to about 10 sequences for the VH domain, about 10⁸ sequences for the GLP1R binding domain, and about 1 to about 44 sequences for the VK domain. The number of variant sequences may be at least or about 5, 10, 15, 20, 25, 30, 35, 40, 45, 50, 55, 60, 65, 70, 75, 80, 85, 90, 95, 100, 125, 150, 175, 200, 225, 250, 275, 300, 325, 350, 375, 400, 425, 450, 475, 500, or more than 500 sequences. In some instances, the number of variant sequences is about 10 to 300, 25 to 275, 50 to 250, 75 to 225, 100 to 200, or 125 to 150 sequences.

[0076] Described herein are antibodies or antibody fragments thereof that binds GLP1R. In some embodiments, the antibody or antibody fragment thereof comprises a sequence as set forth in Tables 8-15. In some embodiments, the antibody or antibody fragment thereof comprises a sequence that is at least or about 70%, 80%, 85%, 90%, 91%, 92%, 93%, 94%, 95%, 96%, 97%, 98%, 99%, or 100% sequence identity to a sequence as set forth in Tables 8-15.

[0077] Described herein, in some embodiments, are antibodies or antibody fragments comprising a variable domain, heavy chain region (VH) and a variable domain, light chain region (VL), wherein the VH comprises an amino acid sequence at least about 90% identical to a sequence as set forth in any one of SEQ ID NOs: 1-1628, and wherein the VL comprises an amino acid sequence at least about 90% identical to a sequence as set forth in any one of SEQ ID NOs: 1629-2643. In some instances, the antibodies or antibody fragments comprise VH comprising at least or about 70%, 80%, 85%, 90%, 91%, 92%, 93%, 94%, 95%, 96%, 97%, 98%, 99%, or 100% sequence identity to any one of SEQ ID NOs: 1-1628, and VL comprising at least or about 70%, 80%, 85%, 90%, 91%, 92%, 93%, 94%, 95%, 96%, 97%, 98%, 99%, or 100% sequence identity to any one of SEQ ID NOs: 1629-2643.

[0078] Described herein, in some embodiments, are antibodies or antibody fragments comprising a variable domain, heavy chain region (VH) comprising an amino acid sequence at least about 90% identical to a sequence as set forth in any one of SEQ ID NOs: 1-1628. In some instances, the antibodies or antibody fragments comprise a VH sequence comprising at least or about 70%, 80%, 85%, 90%, 91%, 92%, 93%, 94%, 95%, 96%, 97%, 98%, 99%, or 100% sequence identity to any one of SEQ ID NOs: 1-1628.

[0079] The term “sequence identity” means that two polynucleotide sequences are identical (i.e., on a nucleotide-by-nucleotide basis) over the window of comparison. The term “percentage of sequence identity” is calculated by comparing two optimally aligned sequences over the window of comparison, determining the number of positions at which the identical nucleic acid base (e.g., A, T, C, G, U, or I) occurs in both sequences to yield the number of matched positions, dividing the number of matched positions by the total number of positions in the window of comparison (i.e., the window size) and multiplying the result by 100 to yield the percentage of sequence identity. Alignment for purposes of determining percent amino acid sequence identity can be achieved in various ways that are within the skill in the art, for instance, using publicly available computer software such as EMBOSS MATCHER, EMBOSS WATER, EMBOSS STRETCHER, EMBOSS NEEDLE, EMBOSS LALIGN, BLAST, BLAST-2, ALIGN or Megalign (DNASTAR) software. Those skilled in the art can determine appropriate parameters for measuring alignment, including any algorithms needed to achieve maximal alignment over the full length of the sequences being compared.

[0080] In situations where ALIGN-2 is employed for amino acid sequence comparisons, the % amino acid sequence identity of a given amino acid sequence A to, with, or against a given amino acid sequence B (which can alternatively be phrased as a given amino acid sequence A that has or comprises a certain % amino acid sequence identity to, with, or against a given amino acid sequence B) is calculated as follows: 100 times the fraction X/Y, where X is the number of amino acid residues scored as identical matches by the sequence alignment program ALIGN-2 in that program's alignment of A and B, and where Y is the total number of amino acid residues in B. It will be appreciated that where the length of amino acid sequence A is not equal to the length of amino acid sequence B, the % amino acid sequence identity of A to B will not equal the % amino acid sequence identity of B to A. Unless specifically stated otherwise, all % amino acid sequence identity values used herein are obtained as described in the immediately preceding paragraph using the ALIGN-2 computer program.

[0081] The term “homology” or “similarity” between two proteins is determined by comparing the amino acid sequence and its conserved amino acid substitutes of one protein sequence to the second protein sequence. Similarity may be determined by procedures which are well-known in the art, for example, a BLAST program (Basic Local Alignment Search Tool at the National Center for Biological Information).

[0082] The terms “complementarity determining region,” and “CDR,” which are synonymous with “hypervariable region” or “HVR,” are known in the art to refer to non-contiguous sequences of amino acids within antibody variable regions, which confer antigen specificity and/or binding affinity. In general, there are three CDRs in each heavy chain variable region (CDRH1, CDRH2, CDRH3) and three CDRs in each light chain variable region (CDRL1, CDRL2, CDRL3). “Framework regions” and “FR” are known in the art to refer to the non-CDR portions of the variable regions of the heavy and light chains. In general, there are four FRs in each full-length heavy chain variable region (FR-H1, FR-H2, FR-H3, and FR-H4), and four FRs in each full-length light chain variable region (FR-L1, FR-L2, FR-L3, and FR-L4). The precise amino acid sequence boundaries of a given CDR or FR can be readily determined using any of a number of well-known schemes, including those described by Kabat et al. (1991), “Sequences of Proteins of Immunological Interest,” 5th Ed. Public Health Service, National Institutes of Health, Bethesda, Md. (“Kabat” numbering scheme), Al-Lazikani et al., (1997) JMB 273,927-948 (“Chothia” numbering scheme); MacCallum et al., J. Mol. Biol. 262:732-745 (1996), “Antibody-antigen interactions: Contact analysis and binding site topography,” J. Mol. Biol. 262, 732-745.” (“Contact” numbering scheme); Lefranc M P et al., “IMGT unique numbering for immunoglobulin and T cell receptor variable domains and Ig superfamily V-like domains,” Dev Comp Immunol, 2003 January; 27(1):55-77 (“IMGT” numbering scheme); Honegger A and Plückthun A, “Yet another numbering scheme for immunoglobulin variable domains: an automatic modeling and analysis tool,” J Mol Biol, 2001 Jun. 8; 309(3):657-70, (“Aho” numbering scheme); and Whitelegg NR and Rees AR, “WAM: an improved algorithm for modelling antibodies on the WEB,” Protein Eng. 2000 Dec.; 13(12):819-24 (“AbM” numbering scheme. In certain embodiments the CDRs of the antibodies described herein can be defined by a method selected from Kabat, Chothia, IMGT, Aho, AbM, or combinations thereof.

[0083] The boundaries of a given CDR or FR may vary depending on the scheme used for identification. For example, the Kabat scheme is based on structural alignments, while the Chothia scheme is based on structural information. Numbering for both the Kabat and Chothia schemes is based upon the most common antibody region sequence lengths, with insertions accommodated by insertion letters, for example, “30a,” and deletions appearing in some antibodies. The two schemes place certain insertions and deletions (“indels”) at different positions, resulting in differential numbering. The Contact scheme is based on analysis of complex crystal structures and is similar in many respects to the Chothia numbering scheme.

[0084] Cytokine variant immunoglobulins (e.g., CD40L, TSLP, IL1RL1, IL1RL2) comprising de novo synthesized variant sequences encoding for immunoglobulins comprising cytokine binding domains comprise improved diversity. For example, variants are generated by placing cytokinebinding domain variants in immunoglobulins comprising N-terminal CDRH3 variations and C-terminal CDRH3 variations. In some instances, variants include affinity maturation variants. Alternatively or in combination, variants include variants in other regions of the immunoglobulin including, but not limited to, CDRH1 and CDRH2. In some instances, the number of variants of the cytokine variant immunoglobulins (e.g., CD40L, TSLP, IL1RL1, IL1RL2) is at least or about 10⁴, 10⁵, 10⁶, 10⁷, 10⁸, 10⁹, 10¹⁰, 10¹¹, 10¹², 10¹³, 10¹⁴, 10¹⁵, 10¹⁶, 10¹⁷, 10¹⁸, 10¹⁹, 10²⁰, or more than 10²⁰ non-identical sequences.

[0085] In some instances, the at least one region of the antibody for variation is from heavy chain V-gene family, heavy chain D-gene family, heavy chain J-gene family, light chain V-gene family, or light chain J-gene family. In some instances, the light chain V-gene family comprises immunoglobulin kappa (IGK) gene or immunoglobulin lambda (IGL). Exemplary regions of the antibody for variation include, but are not limited to, IGHV1-18, IGHV1-69, IGHV1-8, IGHV3-21, IGHV3-23, IGHV3-30/33rn, IGHV3-28, IGHV1-69, IGHV3-74, IGHV4-39, IGHV4-59/61, IGKV1-39, IGKV1-9, IGKV2-28, IGKV3-11, IGKV3-15, IGKV3-20, IGKV4-1, IGLV1-51, IGLV2-14, IGLV1-40, and IGLV3-1. In some instances, the gene is IGHV1-69, IGHV3-30, IGHV3-23, IGHV3, IGHV1-46, IGHV3-7, IGHV1, or IGHV1-8. In some instances, the gene is IGHV1-69 and IGHV3-30. In some instances, the region of the antibody for variation is IGHJ3, IGHJ6, IGHJ, IGHJ4, IGHJ5, IGHJ2, or IGH1. In some instances, the region of the antibody for variation is IGHJ3, IGHJ6, IGHJ, or IGHJ4. In some instances, the at least one region of the antibody for variation is IGHV1-69, IGHV3-23, IGKV3-20, IGKV1-39, or combinations thereof. In some instances, the at least one region of the antibody for variation is IGHV1-69 and IGKV3-20, In some instances, the at least one region of the antibody for variation is IGHV1-69 and IGKV1-39. In some instances, the at least one region of the antibody for variation is IGHV3-23 and IGKV3-20. In some instances, the at least one region of the antibody for variation is IGHV3-23 and IGKV1-39.

[0086] Provided herein are libraries comprising nucleic acids encoding for a GLP1R antibody comprising variation in at least one region of the antibody, wherein the region is the CDR region. In some instances, the GLP1R antibody is a single domain antibody comprising one heavy chain variable domain such as a VHH antibody. In some instances, the VHH antibody comprises variation in one or more CDR regions. In some instances, libraries described herein comprise at least or about 1, 10, 20, 30, 40, 50, 60, 70, 80, 90, 100, 200, 300, 400, 500, 600, 700, 800, 900, 1000, 1200, 1400, 1600, 1800, 2000, 2400, 2600, 2800, 3000, or more than 3000 sequences of a CDR1, CDR2, or CDR3. In some instances, libraries described herein comprise at least or about 10⁴, 10⁵, 10⁶, 10⁷, 10⁸, 10⁹, 10¹⁰, 10¹¹, 10¹², 10¹³, 10¹⁴, 10¹⁵, 10¹⁶, 10¹⁷, 10¹⁸, 10¹⁹, 10²⁰, or more than 10²⁰ sequences of a CDR1, CDR2, or CDR3. For example, the libraries comprise at least 2000 sequences of a CDR1, at least 1200 sequences for CDR2, and at least 1600 sequences for CDR3. In some instances, each sequence is non-identical.

[0087] In some instances, the CDR1, CDR2, or CDR3 is of a variable domain, light chain (VL). CDR1, CDR2, or CDR3 of a variable domain, light chain (VL) can be referred to as CDRL1, CDRL2, or CDRL3, respectively. In some instances, libraries described herein comprise at least or about 1, 2, 3, 4, 5, 6, 7, 8, 9, 10, 20, 30, 40, 50, 60, 70, 80, 90, 100, 200, 300, 400, 500, 600, 700, 800, 900, 1000, 1200, 1400, 1600, 1800, 2000, 2400, 2600, 2800, 3000, or more than 3000 sequences of a CDR1, CDR2, or CDR3 of the VL. In some instances, libraries described herein comprise at least or about 10⁴, 10⁵, 10⁶, 10⁷, 10⁸, 10⁹, 10¹⁰, 10¹¹, 10¹², 10¹³, 10¹⁴, 10¹⁵, 10¹⁶, 10¹⁷, 10¹⁸, 10¹⁹, 10²⁰, or more than 10²⁰ sequences of a CDR1, CDR2, or CDR3 of the VL. For example, the libraries comprise at least 20 sequences of a CDR1 of the VL, at least 4 sequences of a CDR2 of the VL, and at least 140 sequences of a CDR3 of the VL. In some instances, the libraries comprise at least 2 sequences of a CDR1 of the VL, at least 1 sequence of CDR2 of the VL, and at least 3000 sequences of a CDR3 of the VL. In some instances, the VL is IGKV1-39, IGKV1-9, IGKV2-28, IGKV3-11, IGKV3-15, IGKV3-20, IGKV4-1, IGLV1-51, IGLV2-14, IGLV1-40, or IGLV3-1. In some instances, the VL is IGKV2-28. In some instances, the VL is IGLV1-51.

[0088] In some instances, the CDR1, CDR2, or CDR3 is of a variable domain, heavy chain (VH). CDR1, CDR2, or CDR3 of a variable domain, heavy chain (VH) can be referred to as CDRH1, CDRH2, or CDRH3, respectively. In some instances, libraries described herein comprise at least or about 1, 2, 3, 4, 5, 6, 7, 8, 9, 10, 20, 30, 40, 50, 60, 70, 80, 90, 100, 200, 300, 400, 500, 600, 700, 800, 900, 1000, 1200, 1400, 1600, 1800, 2000, 2400, 2600, 2800, 3000, or more than 3000 sequences of a CDR1, CDR2, or CDR3 of the VH. In some instances, libraries described herein comprise at least or about 10⁴, 10⁵, 10⁶, 10⁷, 10⁸, 10⁹, 10¹⁰, 10¹¹, 10¹², 10¹³, 10¹⁴, 10¹⁵, 10¹⁶, 10¹⁷, 10¹⁸, 10¹⁹, 10²⁰, or more than 10²⁰ sequences of a CDR1, CDR2, or CDR3 of the VH. For example, the libraries comprise at least 30 sequences of a CDR1 of the VH, at least 570 sequences of a CDR2 of the VH, and at least 10⁸ sequences of a CDR3 of the VH. In some instances, the libraries comprise at least 30 sequences of a CDR1 of the VH, at least 860 sequences of a CDR2 of the VH, and at least 10⁷ sequences of a CDR3 of the VH. In some instances, the VH is IGHV1-18, IGHV1-69, IGHV1-8 IGHV3-21, IGHV3-23, IGHV3-30/33m, IGHV3-28, IGHV3-74, IGHV4-39, or IGHV4-59/61. In some instances, the VH is IGHV1-69, IGHV3-30, IGHV3-23, IGHV3, IGHV1-46, IGHV3-7, IGHV1, or IGHV1-8. In some instances, the VH is IGHV1-69 or IGHV3-30. In some instances, the VH is IGHV3-23.

[0089] Libraries as described herein, in some embodiments, comprise varying lengths of a CDRL1, CDRL2, CDRL3, CDRH1, CDRH2, or CDRH3. In some instances, the length of the CDRL1, CDRL2, CDRL3, CDRH1, CDRH2, or CDRH3 comprises at least or about 5, 6, 7, 8, 9, 10, 11, 12, 13, 14, 15, 16, 17, 18, 19, 20, 21, 22, 23, 24, 25, 26, 27, 28, 29, 30, 40, 50, 60, 70, 80, 90, or more than 90 amino acids in length. For example, the CDRH3 comprises at least or about 12, 15, 16, 17, 20, 21, or 23 amino acids in length. In some instances, the CDRL1, CDRL2, CDRL3, CDRH1, CDRH2, or CDRH3 comprises a range of about 1 to about 10, about 5 to about 15, about 10 to about 20, or about 15 to about 30 amino acids in length.

[0090] Libraries comprising nucleic acids encoding for antibodies having variant CDR sequences as described herein comprise various lengths of amino acids when translated. In some instances, the length of each of the amino acid fragments or average length of the amino acid synthesized may be at least or about 15, 20, 25, 30, 35, 40, 45, 50, 55, 60, 65, 70, 75, 80, 85, 90, 95, 100, 105, 110, 115, 120, 125, 130, 135, 140, 145, 150, or more than 150 amino acids. In some instances, the length of the amino acid is about 15 to 150, 20 to 145, 25 to 140, 30 to 135, 35 to 130, 40 to 125, 45 to 120, 50 to 115, 55 to 110, 60 to 110, 65 to 105, 70 to 100, or 75 to 95 amino acids. In some instances, the length of the amino acid is about 22 amino acids to about 75 amino acids. In some instances, the antibodies comprise at least or about 100, 200, 300, 400, 500, 600, 700, 800, 900, 1000, 2000, 3000, 4000, 5000, or more than 5000 amino acids.

[0091] Ratios of the lengths of a CDRL1, CDRL2, CDRL3, CDRH1, CDRH2, or CDRH3 may vary in libraries described herein. In some instances, a CDRL1, CDRL2, CDRL3, CDRH1, CDRH2, or CDRH3 comprising at least or about 5, 6, 7, 8, 9, 10, 11, 12, 13, 14, 15, 16, 17, 18, 19, 20, 21, 22, 23, 24, 25, 26, 27, 28, 29, 30, 40, 50, 60, 70, 80, 90, or more than 90 amino acids in length comprises about 10%, 20%, 30%, 40%, 50%, 60%, 70%, 80%, 90%, or more than 90% of the library. For example, a CDRH3 comprising about 23 amino acids in length is present in the library at 40%, a CDRH3 comprising about 21 amino acids in length is present in the library at 30%, a CDRH3 comprising about 17 amino acids in length is present in the library at 20%, and a CDRH3 comprising about 12 amino acids in length is present in the library at 10%. In some instances, a CDRH3 comprising about 20 amino acids in length is present in the library at 40%, a CDRH3 comprising about 16 amino acids in length is present in the library at 30%, a CDRH3 comprising about 15 amino acids in length is present in the library at 20%, and a CDRH3 comprising about 12 amino acids in length is present in the library at 10%.

[0092] Libraries as described herein encoding for a VHH antibody comprise variant CDR sequences that are shuffled to generate a library with a theoretical diversity of at least or about 10⁷, 10⁸, 10⁹, 10¹⁰, 10¹¹, 10¹², 10¹³, 10¹⁴, 10¹⁵, 10¹⁶, 10¹⁷, 10¹⁸, 10¹⁹, 10²⁰, or more than 10²⁰ sequences. In some instances, the library has a final library diversity of at least or about 10⁷, 10⁸, 10⁹, 10¹⁰, 10¹¹, 10¹², 10¹3, 10¹⁴, 10¹⁵, 10¹⁶, 10¹⁷, 10¹⁸, 10¹⁹, 10²⁰, or more than 10²⁰ sequences.

[0093] Provided herein are cytokine variant immunoglobulins (e.g., CD40L, TSLP, IL1RL1, IL1RL2) encoding for an immunoglobulin. In some instances, the cytokine immunoglobulin is an antibody. In some instances, the cytokine immunoglobulin is a VHH antibody. In some instances, the cytokine immunoglobulin comprises a binding affinity (e.g., kD) to cytokine of less than 1 nM, less than 1.2 nM, less than 2 nM, less than 5 nM, less than 10 nM, less than 11 nm, less than 13.5 nM, less than 15 nM, less than 20 nM, less than 25 nM, or less than 30 nM. In some instances, the cytokine immunoglobulin comprises a kD of less than 1 nM. In some instances, the cytokine immunoglobulin comprises a kD of less than 1.2 nM. In some instances, the cytokine immunoglobulin comprises a kD of less than 2 nM. In some instances, the cytokine immunoglobulin comprises a kD of less than 5 nM. In some instances, the cytokine immunoglobulin comprises a kD of less than 10 nM. In some instances, the cytokine immunoglobulin comprises a kD of less than 13.5 nM. In some instances, the cytokine immunoglobulin comprises a kD of less than 15 nM. In some instances, the cytokine immunoglobulin comprises a kD of less than 20 nM. In some instances, the cytokine immunoglobulin comprises a kD of less than 25 nM. In some instances, the cytokine immunoglobulin comprises a kD of less than 30 nM.

[0094] Provided herein are cytokine variant immunoglobulins (e.g., CD40L, TSLP, IL1RL1, IL1RL2) encoding for an immunoglobulin, wherein the immunoglobulin comprises a long half-life. In some instances, the half-life of the cytokine immunoglobulin is at least or about 12 hours, 24 hours 36 hours, 48 hours, 60 hours, 72 hours, 84 hours, 96 hours, 108 hours, 120 hours, 140 hours, 160 hours, 180 hours, 200 hours, or more than 200 hours. In some instances, the half-life of the cytokine immunoglobulin is in a range of about 12 hours to about 300 hours, about 20 hours to about 280 hours, about 40 hours to about 240 hours, or about 60 hours to about 200 hours.

[0095] Cytokine immunoglobulins as described herein may comprise improved properties. In some instances, the cytokine immunoglobulins are monomeric. In some instances, the cytokine immunoglobulins are not prone to aggregation. In some instances, at least or about 70%, 75%, 80%, 85%, 90%, 95%, or 99% of the cytokine immunoglobulins are monomeric. In some instances, the cytokine immunoglobulins are thermostable. In some instances, the cytokine immunoglobulins result in reduced non-specific binding.

[0096] Following synthesis of cytokine variant immunoglobulins (e.g., CD40L, TSLP, IL1RL1, ILTRL2) comprising nucleic acids encoding immunoglobulins comprising cytokine binding domains, libraries may be used for screening and analysis. For example, libraries are assayed for library displayability and panning. In some instances, displayability is assayed using a selectable tag. Exemplary tags include, but are not limited to, a radioactive label, a fluorescent label, an enzyme, a chemiluminescent tag, a colorimetric tag, an affinity tag or other labels or tags that are known in the art. In some instances, the tag is histidine, polyhistidine, myc, hemagglutinin (HA), or FLAG. In some instances, the cytokine variant immunoglobulins (e.g., CD40L, TSLP, IL1RL1, IL1RL2) comprises nucleic acids encoding immunoglobulins with multiple tags such as GFP, FLAG, and Lucy as well as a DNA barcode. In some instances, libraries are assayed by sequencing using various methods including, but not limited to, single-molecule real-time (SMRT) sequencing, Polony sequencing, sequencing by ligation, reversible terminator sequencing, proton detection sequencing, ion semiconductor sequencing, nanopore sequencing, electronic sequencing, pyrosequencing, Maxam-Gilbert sequencing, chain termination (e.g., Sanger) sequencing, +S sequencing, or sequencing by synthesis.

[0097] Expression Systems

[0098] Provided herein are libraries comprising nucleic acids encoding for immunoglobulins comprising cytokine binding domains, wherein the libraries have improved specificity, stability, expression, folding, or downstream activity. In some instances, libraries described herein are used for screening and analysis.

[0099] Provided herein are libraries comprising nucleic acids encoding for immunoglobulins comprising cytokine binding domains, wherein the nucleic acid libraries are used for screening and analysis. In some instances, screening and analysis comprise in vitro, in vivo, or ex vivo assays. Cells for screening include primary cells taken from living subjects or cell lines. Cells may be from prokaryotes (e.g., bacteria and fungi) or eukaryotes (e.g., animals and plants). Exemplary animal cells include, without limitation, those from a mouse, rabbit, primate, and insect. In some instances, cells for screening include a cell line including, but not limited to, Chinese Hamster Ovary (CHO) cell line, human embryonic kidney (HEK) cell line, or baby hamster kidney (BHK) cell line. In some instances, nucleic acid libraries described herein may also be delivered to a multicellular organism. Exemplary multicellular organisms include, without limitation, a plant, a mouse, rabbit, primate, and insect.

[0100] Nucleic acid libraries or protein libraries encoded thereof described herein may be screened for various pharmacological or pharmacokinetic properties. In some instances, the libraries are screened using in vitro assays, in vivo assays, or ex vivo assays. For example, in vitro pharmacological or pharmacokinetic properties that are screened include, but are not limited to, binding affinity, binding specificity, and binding avidity. Exemplary in vivo pharmacological or pharmacokinetic properties of libraries described herein that are screened include, but are not limited to, therapeutic efficacy, activity, preclinical toxicity properties, clinical efficacy properties, clinical toxicity properties, immunogenicity, potency, and clinical safety properties.

[0101] Pharmacological or pharmacokinetic properties that may be screened include, but are not limited to, cell binding affinity and cell activity. For example, cell binding affinity assays or cell activity assays are performed to determine agonistic, antagonistic, or allosteric effects of libraries described herein. In some instances, the cell activity assay is a cAMP assay. In some instances, libraries as described herein are compared to cell binding or cell activity of ligands of DKK1.

[0102] Libraries as described herein may be screened in cell-based assays or in non-cell-based assays. Examples of non-cell-based assays include, but are not limited to, using viral particles, using in vitro translation proteins, and using proteoliposomes with cytokine.

[0103] Nucleic acid libraries as described herein may be screened by sequencing. In some instances, next generation sequence is used to determine sequence enrichment of cytokine binding variants. In some instances, V gene distribution, J gene distribution, V gene family, CDR3 counts per length, or a combination thereof is determined. In some instances, clonal frequency, clonal accumulation, lineage accumulation, or a combination thereof is determined. In some instances, number of sequences, sequences with VH clones, clones, clones greater than 1, clonotypes, clonotypes greater than 1, lineages, simpsons, or a combination thereof is determined. In some instances, a percentage of non-identical CDR3s is determined. For example, the percentage of non-identical CDR3s is calculated as the number of non-identical CDR3s in a sample divided by the total number of sequences that had a CDR3 in the sample.

[0104] Provided herein are nucleic acid libraries, wherein the nucleic acid libraries may be expressed in a vector. Expression vectors for inserting nucleic acid libraries disclosed herein may comprise eukaryotic or prokaryotic expression vectors. Exemplary expression vectors include, without limitation, mammalian expression vectors: pSF-CMV-NEO-NH2-PPT-3XFLAG, pSF-CMV-NEO-COOH-3XFLAG, pSF-CMV-PURO-NH2-GST-TEV, pSF-OXB20-COOH-TEV-FLAG(R)-6His, pCEP4 pDEST27, pSF-CMV-Ub-KrYFP, pSF-CMV-FMDV-daGFP, pEF1a-mCherry-N1 Vector, pEF1a-tdTomato Vector, pSF-CMV-FMDV-Hygro, pSF-CMV-PGK-Puro, pMCP-tag(m), and pSF-CMV-PURO-NH2-CMYC; bacterial expression vectors: pSF-OXB20-BetaGal,pSF-OXB20-Fluc, pSF-OXB20, and pSF-Tac; plant expression vectors: pRI 101-AN DNA and pCambia2301; and yeast expression vectors: pTYB21 and pKLAC2, and insect vectors: pAc5.1/V5-His A and pDEST8. In some instances, the vector is pcDNA3 or pcDNA3.1.

[0105] Described herein are nucleic acid libraries that are expressed in a vector to generate a construct comprising an immunoglobulin comprising sequences of cytokine binding domains. In some instances, a size of the construct varies. In some instances, the construct comprises at least or about 500, 600, 700, 800, 900, 1000, 1100, 1300, 1400, 1500, 1600, 1700, 1800, 2000, 2400, 2600, 2800, 3000, 3200, 3400, 3600, 3800, 4000, 4200, 4400, 4600, 4800, 5000, 6000, 7000, 8000, 9000, 10000, or more than 10000 bases. In some instances, a the construct comprises a range of about 300 to 1,000, 300 to 2,000, 300 to 3,000, 300 to 4,000, 300 to 5,000, 300 to 6,000, 300 to 7,000, 300 to 8,000, 300 to 9,000, 300 to 10,000, 1,000 to 2,000, 1,000 to 3,000, 1,000 to 4,000, 1,000 to 5,000, 1,000 to 6,000, 1,000 to 7,000, 1,000 to 8,000, 1,000 to 9,000, 1,000 to 10,000, 2,000 to 3,000, 2,000 to 4,000, 2,000 to 5,000, 2,000 to 6,000, 2,000 to 7,000, 2,000 to 8,000, 2,000 to 9,000, 2,000 to 10,000, 3,000 to 4,000, 3,000 to 5,000, 3,000 to 6,000, 3,000 to 7,000, 3,000 to 8,000, 3,000 to 9,000, 3,000 to 10,000, 4,000 to 5,000, 4,000 to 6,000, 4,000 to 7,000, 4,000 to 8,000, 4,000 to 9,000, 4,000 to 10,000, 5,000 to 6,000, 5,000 to 7,000, 5,000 to 8,000, 5,000 to 9,000, 5,000 to 10,000, 6,000 to 7,000, 6,000 to 8,000, 6,000 to 9,000, 6,000 to 10,000, 7,000 to 8,000, 7,000 to 9,000, 7,000 to 10,000, 8,000 to 9,000, 8,000 to 10,000, or 9,000 to 10,000 bases.

[0106] Provided herein are libraries comprising nucleic acids encoding for immunoglobulins, wherein the nucleic acid libraries are expressed in a cell. In some instances, the libraries are synthesized to express a reporter gene. Exemplary reporter genes include, but are not limited to, acetohydroxyacid synthase (AHAS), alkaline phosphatase (AP), beta galactosidase (LacZ), beta glucoronidase (GUS), chloramphenicol acetyltransferase (CAT), green fluorescent protein (GFP), red fluorescent protein (RFP), yellow fluorescent protein (YFP), cyan fluorescent protein (CFP), cerulean fluorescent protein, citrine fluorescent protein, orange fluorescent protein, cherry fluorescent protein, turquoise fluorescent protein, blue fluorescent protein, horseradish peroxidase (HRP), luciferase (Luc), nopaline synthase (NOS), octopine synthase (OCS), luciferase, and derivatives thereof. Methods to determine modulation of a reporter gene are well known in the art, and include, but are not limited to, fluorometric methods (e.g. fluorescence spectroscopy, Fluorescence Activated Cell Sorting (FACS), fluorescence microscopy), and antibiotic resistance determination.

[0107] Diseases and Disorders

[0108] Provided herein are cytokine variant immunoglobulins (e.g., CD40L, TSLP, IL1RL1, IL1RL2) comprising nucleic acids encoding for immunoglobulins (e.g., antibodies) comprising cytokine binding domains that may have therapeutic effects. In some instances, the cytokine variant immunoglobulins (e.g., CD40L, TSLP, ILIRL1, IL1RL2) result in protein when translated that is used to treat a disease or disorder. In some instances, the protein is an immunoglobulin. In some instances, the protein is a peptidomimetic.

[0109] Exemplary diseases include, but are not limited to, cancer, an inflammatory disease or disorder, an autoimmune disease or disorder, a metabolic disease or disorder, a cardiovascular disease or disorder, a respiratory disease or disorder, pain, a digestive disease or disorder, a reproductive disease or disorder, an endocrine disease or disorder, or a neurological disease or disorder. In some instances, the autoimmune disease is hyper IgM syndrome (HIGM). In some instances, the autoimmune disease is eosinophilic esophagitis. In some instances, the inflammatory disease is familial cold autoinflammatory syndrome 2. In some instances, the autoimmune disorder is psoriasis, particularly generalized pustular psoriasis. In some instances, the autoimmune disorder is asthma. In some instances, the autoimmune disease is eczema. In some instances, the cardiovascular disease is an aortic dissection. In some instances, the respiratory disease is Loeffler syndrome. In some instances, the subject is a mammal. In some instances, the subject is a mouse, rabbit, dog, or human. Subjects treated by methods described herein may be infants, adults, or children. Pharmaceutical compositions comprising antibodies or antibody fragments as described herein may be administered intravenously or subcutaneously.

[0110] Described herein are pharmaceutical compositions comprising antibodies or antibody fragment thereof that binds cytokine. In some embodiments, the antibody or antibody fragment thereof comprises a sequence as set forth in Tables 8-15. In some embodiments, the antibody or antibody fragment thereof comprises a sequence that is at least or about 70%, 80%, 85%, 90%, 91%, 92%, 93%, 94%, 95%, 96%, 97%, 98%, 99%, or 100% sequence identity to a sequence as set forth in Tables 8-15.

[0111] Described herein, in some embodiments, are antibodies or antibody fragments comprising a variable domain, heavy chain region (VH) and a variable domain, light chain region (VL), wherein the VH comprises an amino acid sequence at least about 90% identical to a sequence as set forth in any one of SEQ ID NOs: 1-1628, and wherein the VL comprises an amino acid sequence at least about 90% identical to a sequence as set forth in any one of SEQ ID NOs: 1629-2643. In some instances, the antibodies or antibody fragments comprise VH comprising at least or about 70%, 80%, 85%, 90%, 91%, 92%, 93%, 94%, 95%, 96%, 97%, 98%, 99%, or 100% sequence identity to any one of SEQ ID NOs: 1-1628, and VL comprising at least or about 70%, 80%, 85%, 90%, 91%, 92%, 93%, 94%, 95%, 96%, 97%, 98%, 99%, or 100% sequence identity to any one of SEQ ID NOs: 1629-2643.

[0112] Variant Libraries

[0113] Codon Variation

[0114] Variant nucleic acid libraries described herein may comprise a plurality of nucleic acids, wherein each nucleic acid encodes for a variant codon sequence compared to a reference nucleic acid sequence. In some instances, each nucleic acid of a first nucleic acid population contains a variant at a single variant site. In some instances, the first nucleic acid population contains a plurality of variants at a single variant site such that the first nucleic acid population contains more than one variant at the same variant site. The first nucleic acid population may comprise nucleic acids collectively encoding multiple codon variants at the same variant site. The first nucleic acid population may comprise nucleic acids collectively encoding up to 19 or more codons at the same position. The first nucleic acid population may comprise nucleic acids collectively encoding up to 60 variant triplets at the same position, or the first nucleic acid population may comprise nucleic acids collectively encoding up to 61 different triplets of codons at the same position. Each variant may encode for a codon that results in a different amino acid during translation.

[0115] A nucleic acid population may comprise varied nucleic acids collectively encoding up to 20 codon variations at multiple positions. In such cases, each nucleic acid in the population comprises variation for codons at more than one position in the same nucleic acid. In some instances, each nucleic acid in the population comprises variation for codons at 1, 2, 3, 4, 5, 6, 7, 8, 9, 10, 11, 12, 13, 14, 15, 16, 17, 18, 19, 20 or more codons in a single nucleic acid. In some instances, each variant long nucleic acid comprises variation for codons at 1, 2, 3, 4, 5, 6, 7, 8, 9, 10, 11, 12, 13, 14, 15, 16, 17, 18, 19, 20, 21, 22, 23, 24, 25, 26, 27, 28, 29, 30 or more codons in a single long nucleic acid. In some instances, the variant nucleic acid population comprises variation for codons at 1, 2, 3, 4, 5, 6, 7, 8, 9, 10, 11, 12, 13, 14, 15, 16, 17, 18, 19, 20, 21, 22, 23, 24, 25, 26, 27, 28, 29, 30 or more codons in a single nucleic acid. In some instances, the variant nucleic acid population comprises variation for codons in at least about 10, 20, 30, 40, 50, 60, 70, 80, 90, 100 or more codons in a single long nucleic acid.

[0116] Highly Parallel Nucleic Acid Synthesis

[0117] Provided herein is a platform approach utilizing miniaturization, parallelization, and vertical integration of the end-to-end process from polynucleotide synthesis to gene assembly within nanowells on silicon to create a revolutionary synthesis platform. Devices described herein provide, with the same footprint as a 96-well plate, a silicon synthesis platform capable of increasing throughput by a factor of up to 1,000 or more compared to traditional synthesis methods, with production of up to approximately 1,000,000 or more polynucleotides, or 10,000 or more genes in a single highly-parallelized run.

[0118] With the advent of next-generation sequencing, high resolution genomic data has become an important factor for studies that delve into the biological roles of various genes in both normal biology and disease pathogenesis. At the core of this research is the central dogma of molecular biology and the concept of “residue-by-residue transfer of sequential information.” Genomic information encoded in the DNA is transcribed into a message that is then translated into the protein that is the active product within a given biological pathway.

[0119] Another exciting area of study is on the discovery, development and manufacturing of therapeutic molecules focused on a highly-specific cellular target. High diversity DNA sequence libraries are at the core of development pipelines for targeted therapeutics. Gene mutants are used to express proteins in a design, build, and test protein engineering cycle that ideally culminates in an optimized gene for high expression of a protein with high affinity for its therapeutic target. As an example, consider the binding pocket of a receptor. The ability to test all sequence permutations of all residues within the binding pocket simultaneously will allow for a thorough exploration, increasing chances of success. Saturation mutagenesis, in which a researcher attempts to generate all possible mutations at a specific site within the receptor, represents one approach to this development challenge. Though costly and time- and labor-intensive, it enables each variant to be introduced into each position. In contrast, combinatorial mutagenesis, where a few selected positions or short stretch of DNA may be modified extensively, generates an incomplete repertoire of variants with biased representation.

[0120] To accelerate the drug development pipeline, a library with the desired variants available at the intended frequency in the right position available for testing—in other words, a precision library—enables reduced costs as well as turnaround time for screening. Provided herein are methods for synthesizing nucleic acid synthetic variant libraries which provide for precise introduction of each intended variant at the desired frequency. To the end user, this translates to the ability to not only thoroughly sample sequence space but also be able to query these hypotheses in an efficient manner, reducing cost and screening time. Genome-wide editing can elucidate important pathways, libraries where each variant and sequence permutation can be tested for optimal functionality, and thousands of genes can be used to reconstruct entire pathways and genomes to re-engineer biological systems for drug discovery.

[0121] In a first example, a drug itself can be optimized using methods described herein. For example, to improve a specified function of an antibody, a variant polynucleotide library encoding for a portion of the antibody is designed and synthesized. A variant nucleic acid library for the antibody can then be generated by processes described herein (e.g., PCR mutagenesis followed by insertion into a vector). The antibody is then expressed in a production cell line and screened for enhanced activity. Example screens include examining modulation in binding affinity to an antigen, stability, or effector function (e.g., ADCC, complement, or apoptosis). Exemplary regions to optimize the antibody include, without limitation, the Fc region, Fab region, variable region of the Fab region, constant region of the Fab region, variable domain of the heavy chain or light chain (VH or VL), and specific complementarity-determining regions (CDRs) of VH or VL.

[0122] Nucleic acid libraries synthesized by methods described herein may be expressed in various cells associated with a disease state. Cells associated with a disease state include cell lines, tissue samples, primary cells from a subject, cultured cells expanded from a subject, or cells in a model system. Exemplary model systems include, without limitation, plant and animal models of a disease state.

[0123] To identify a variant molecule associated with prevention, reduction or treatment of a disease state, a variant nucleic acid library described herein is expressed in a cell associated with a disease state, or one in which a cell a disease state can be induced. In some instances, an agent is used to induce a disease state in cells. Exemplary tools for disease state induction include, without limitation, a Cre/Lox recombination system, LPS inflammation induction, and streptozotocin to induce hypoglycemia. The cells associated with a disease state may be cells from a model system or cultured cells, as well as cells from a subject having a particular disease condition. Exemplary disease conditions include a bacterial, fungal, viral, autoimmune, or proliferative disorder (e.g., cancer). In some instances, the variant nucleic acid library is expressed in the model system, cell line, or primary cells derived from a subject, and screened for changes in at least one cellular activity. Exemplary cellular activities include, without limitation, proliferation, cycle progression, cell death, adhesion, migration, reproduction, cell signaling, energy production, oxygen utilization, metabolic activity, and aging, response to free radical damage, or any combination thereof.

[0124] Substrates

[0125] Devices used as a surface for polynucleotide synthesis may be in the form of substrates which include, without limitation, homogenous array surfaces, patterned array surfaces, channels, beads, gels, and the like. Provided herein are substrates comprising a plurality of clusters, wherein each cluster comprises a plurality of loci that support the attachment and synthesis of polynucleotides. In some instances, substrates comprise a homogenous array surface. For example, the homogenous array surface is a homogenous plate. The term “locus” as used herein refers to a discrete region on a structure which provides support for polynucleotides encoding for a single predetermined sequence to extend from the surface. In some instances, a locus is on a two-dimensional surface, e.g., a substantially planar surface. In some instances, a locus is on a three-dimensional surface, e.g., a well, microwell, channel, or post. In some instances, a surface of a locus comprises a material that is actively functionalized to attach to at least one nucleotide for polynucleotide synthesis, or preferably, a population of identical nucleotides for synthesis of a population of polynucleotides. In some instances, polynucleotide refers to a population of polynucleotides encoding for the same nucleic acid sequence. In some cases, a surface of a substrate is inclusive of one or a plurality of surfaces of a substrate. The average error rates for polynucleotides synthesized within a library described here using the systems and methods provided are often less than 1 in 1000, less than about 1 in 2000, less than about 1 in 3000 or less often without error correction.

[0126] Provided herein are surfaces that support the parallel synthesis of a plurality of polynucleotides having different predetermined sequences at addressable locations on a common support. In some instances, a substrate provides support for the synthesis of more than 50, 100, 200, 400, 600, 800, 1000, 1200, 1400, 1600, 1800, 2,000; 5,000; 10,000; 20,000; 50,000; 100,000; 200,000; 300,000; 400,000; 500,000; 600,000; 700,000; 800,000; 900,000; 1,000,000; 1,200,000; 1,400,000; 1,600,000; 1,800,000; 2,000,000; 2,500,000; 3,000,000; 3,500,000; 4,000,000; 4,500,000; 5,000,000; 10,000,000 or more non-identical polynucleotides. In some cases, the surfaces provide support for the synthesis of more than 50, 100, 200, 400, 600, 800, 1000, 1200, 1400, 1600, 1800, 2,000; 5,000; 10,000; 20,000; 50,000; 100,000; 200,000; 300,000; 400,000; 500,000; 600,000; 700,000; 800,000; 900,000; 1,000,000; 1,200,000; 1,400,000; 1,600,000; 1,800,000; 2,000,000; 2,500,000; 3,000,000; 3,500,000; 4,000,000; 4,500,000; 5,000,000; 10,000,000 or more polynucleotides encoding for distinct sequences. In some instances, at least a portion of the polynucleotides have an identical sequence or are configured to be synthesized with an identical sequence. In some instances, the substrate provides a surface environment for the growth of polynucleotides having at least 80, 90, 100, 120, 150, 175, 200, 225, 250, 275, 300, 325, 350, 375, 400, 425, 450, 475, 500 bases or more.

[0127] Provided herein are methods for polynucleotide synthesis on distinct loci of a substrate, wherein each locus supports the synthesis of a population of polynucleotides. In some cases, each locus supports the synthesis of a population of polynucleotides having a different sequence than a population of polynucleotides grown on another locus. In some instances, each polynucleotide sequence is synthesized with 1, 2, 3, 4, 5, 6, 7, 8, 9 or more redundancy across different loci within the same cluster of loci on a surface for polynucleotide synthesis. In some instances, the loci of a substrate are located within a plurality of clusters. In some instances, a substrate comprises at least 10, 500, 1000, 2000, 3000, 4000, 5000, 6000, 7000, 8000, 9000, 10000, 11000, 12000, 13000, 14000, 15000, 20000, 30000, 40000, 50000 or more clusters. In some instances, a substrate comprises more than 2,000; 5,000; 10,000; 100,000; 200,000; 300,000; 400,000; 500,000; 600,000; 700,000; 800,000; 900,000; 1,000,000; 1,100,000; 1,200,000; 1,300,000; 1,400,000; 1,500,000; 1,600,000; 1,700,000; 1,800,000; 1,900,000; 2,000,000; 300,000; 400,000; 500,000; 600,000; 700,000; 800,000; 900,000; 1,000,000; 1,200,000; 1,400,000; 1,600,000; 1,800,000; 2,000,000; 2,500,000; 3,000,000; 3,500,000; 4,000,000; 4,500,000; 5,000,000; or 10,000,000 or more distinct loci. In some instances, a substrate comprises about 10,000 distinct loci. The amount of loci within a single cluster is varied in different instances. In some cases, each cluster includes 1, 2, 3, 4, 5, 6, 7, 8, 9, 10, 20, 30, 40, 50, 60, 70, 80, 90, 100, 120, 130, 150, 200, 300, 400, 500 or more loci. In some instances, each cluster includes about 50-500 loci. In some instances, each cluster includes about 100-200 loci. In some instances, each cluster includes about 100-150 loci. In some instances, each cluster includes about 109, 121, 130 or 137 loci. In some instances, each cluster includes about 19, 20, 61, 64 or more loci. Alternatively or in combination, polynucleotide synthesis occurs on a homogenous array surface.

[0128] In some instances, the number of distinct polynucleotides synthesized on a substrate is dependent on the number of distinct loci available in the substrate. In some instances, the density of loci within a cluster or surface of a substrate is at least or about 1, 10, 25, 50, 65, 75, 100, 130, 150, 175, 200, 300, 400, 500, 1,000 or more loci per mm². In some cases, a substrate comprises 10-500, 25-400, 50-500, 100-500, 150-500, 10-250, 50-250, 10-200, or 50-200 mm². In some instances, the distance between the centers of two adjacent loci within a cluster or surface is from about 10-500, from about 10-200, or from about 10-100 um. In some instances, the distance between two centers of adjacent loci is greater than about 10, 20, 30, 40, 50, 60, 70, 80, 90 or 100 um. In some instances, the distance between the centers of two adjacent loci is less than about 200, 150, 100, 80, 70, 60, 50, 40, 30, 20 or 10 um. In some instances, each locus has a width of about 0.5, 1, 2, 3, 4, 5, 6, 7, 8, 9, 10, 20, 30, 40, 50, 60, 70, 80, 90 or 100 um. In some cases, each locus has a width of about 0.5-100, 0.5-50, 10-75, or 0.5-50 um.

[0129] In some instances, the density of clusters within a substrate is at least or about 1 cluster per 100 mm², 1 cluster per 10 mm², 1 cluster per 5 mm², 1 cluster per 4 mm², 1 cluster per 3 mm², 1 cluster per 2 mm², 1 cluster per 1 mm², 2 clusters per 1 mm², 3 clusters per 1 mm², 4 clusters per 1 mm², 5 clusters per 1 mm², 10 clusters per 1 mm², 50 clusters per 1 mm² or more. In some instances, a substrate comprises from about 1 cluster per 10 mm² to about 10 clusters per 1 mm². In some instances, the distance between the centers of two adjacent clusters is at least or about 50, 100, 200, 500, 1000, 2000, or 5000 um. In some cases, the distance between the centers of two adjacent clusters is between about 50-100, 50-200, 50-300, 50-500, and 100-2000 um. In some cases, the distance between the centers of two adjacent clusters is between about 0.05-50, 0.05-10, 0.05-5, 0.05-4, 0.05-3, 0.05-2, 0.1-10, 0.2-10, 0.3-10, 0.4-10, 0.5-10, 0.5-5, or 0.5-2 mm. In some cases, each cluster has a cross section of about 0.5 to about 2, about 0.5 to about 1, or about 1 to about 2 mm. In some cases, each cluster has a cross section of about 0.5, 0.6, 0.7, 0.8, 0.9, 1, 1.1, 1.2, 1.3, 1.4, 1.5, 1.6, 1.7, 1.8, 1.9 or 2 mm. In some cases, each cluster has an interior cross section of about 0.5, 0.6, 0.7, 0.8, 0.9, 1, 1.1, 1.15, 1.2, 1.3, 1.4, 1.5, 1.6, 1.7, 1.8, 1.9 or 2 mm.

[0130] In some instances, a substrate is about the size of a standard 96 well plate, for example between about 100 and about 200 mm by between about 50 and about 150 mm. In some instances, a substrate has a diameter less than or equal to about 1000, 500, 450, 400, 300, 250, 200, 150, 100 or 50 mm. In some instances, the diameter of a substrate is between about 25-1000, 25-800, 25-600, 25-500, 25-400, 25-300, or 25-200 mm. In some instances, a substrate has a planar surface area of at least about 100; 200; 500; 1,000; 2,000; 5,000; 10,000; 12,000; 15,000; 20,000; 30,000; 40,000; 50,000 mm² or more. In some instances, the thickness of a substrate is between about 50-2000, 50-1000, 100-1000, 200-1000, or 250-1000 mm.

[0131] Surface Materials

[0132] Substrates, devices, and reactors provided herein are fabricated from any variety of materials suitable for the methods, compositions, and systems described herein. In certain instances, substrate materials are fabricated to exhibit a low level of nucleotide binding. In some instances, substrate materials are modified to generate distinct surfaces that exhibit a high level of nucleotide binding. In some instances, substrate materials are transparent to visible and/or UV light. In some instances, substrate materials are sufficiently conductive, e.g., are able to form uniform electric fields across all or a portion of a substrate. In some instances, conductive materials are connected to an electric ground. In some instances, the substrate is heat conductive or insulated. In some instances, the materials are chemical resistant and heat resistant to support chemical or biochemical reactions, for example polynucleotide synthesis reaction processes. In some instances, a substrate comprises flexible materials. For flexible materials, materials can include, without limitation: nylon, both modified and unmodified, nitrocellulose, polypropylene, and the like. In some instances, a substrate comprises rigid materials. For rigid materials, materials can include, without limitation: glass; fuse silica; silicon, plastics (for example polytetraflouroethylene, polypropylene, polystyrene, polycarbonate, and blends thereof, and the like); and metals (for example, gold, platinum, and the like). The substrate, solid support or reactors can be fabricated from a material selected from the group consisting of silicon, polystyrene, agarose, dextran, cellulosic polymers, polyacrylamides, polydimethylsiloxane (PDMS), and glass. The substrates/solid supports or the microstructures/reactors therein may be manufactured with a combination of materials listed herein or any other suitable material known in the art.

[0133] Surface Architecture

[0134] Provided herein are substrates for the methods, compositions, and systems described herein, wherein the substrates have a surface architecture suitable for the methods, compositions, and systems described herein. In some instances, a substrate comprises raised and/or lowered features. One benefit of having such features is an increase in surface area to support polynucleotide synthesis. In some instances, a substrate having raised and/or lowered features is referred to as a three-dimensional substrate. In some cases, a three-dimensional substrate comprises one or more channels. In some cases, one or more loci comprise a channel. In some cases, the channels are accessible to reagent deposition via a deposition device such as a material deposition device. In some cases, reagents and/or fluids collect in a larger well in fluid communication one or more channels. For example, a substrate comprises a plurality of channels corresponding to a plurality of loci with a cluster, and the plurality of channels are in fluid communication with one well of the cluster. In some methods, a library of polynucleotides is synthesized in a plurality of loci of a cluster.

[0135] Provided herein are substrates for the methods, compositions, and systems described herein, wherein the substrates are configured for polynucleotide synthesis. In some instances, the structure is configured to allow for controlled flow and mass transfer paths for polynucleotide synthesis on a surface. In some instances, the configuration of a substrate allows for the controlled and even distribution of mass transfer paths, chemical exposure times, and/or wash efficacy during polynucleotide synthesis. In some instances, the configuration of a substrate allows for increased sweep efficiency, for example by providing sufficient volume for a growing polynucleotide such that the excluded volume by the growing polynucleotide does not take up more than 50, 45, 40, 35, 30, 25, 20, 15, 14, 13, 12, 11, 10, 9, 8, 7, 6, 5, 4, 3, 2, 1%, or less of the initially available volume that is available or suitable for growing the polynucleotide. In some instances, a three-dimensional structure allows for managed flow of fluid to allow for the rapid exchange of chemical exposure.

[0136] Provided herein are substrates for the methods, compositions, and systems described herein, wherein the substrates comprise structures suitable for the methods, compositions, and systems described herein. In some instances, segregation is achieved by physical structure. In some instances, segregation is achieved by differential functionalization of the surface generating active and passive regions for polynucleotide synthesis. In some instances, differential functionalization is achieved by alternating the hydrophobicity across the substrate surface, thereby creating water contact angle effects that cause beading or wetting of the deposited reagents. Employing larger structures can decrease splashing and cross-contamination of distinct polynucleotide synthesis locations with reagents of the neighboring spots. In some cases, a device, such as a material deposition device, is used to deposit reagents to distinct polynucleotide synthesis locations. Substrates having three-dimensional features are configured in a manner that allows for the synthesis of a large number of polynucleotides (e.g., more than about 10,000) with a low error rate (e.g., less than about 1:500, 1:1000, 1:1500, 1:2,000, 1:3,000, 1:5,000, or 1:10,000). In some cases, a substrate comprises features with a density of about or greater than about 1, 5, 10, 20, 30, 40, 50, 60, 70, 80, 100, 110, 120, 130, 140, 150, 160, 170, 180, 190, 200, 300, 400 or 500 features per mm².

[0137] A well of a substrate may have the same or different width, height, and/or volume as another well of the substrate. A channel of a substrate may have the same or different width, height, and/or volume as another channel of the substrate. In some instances, the diameter of a cluster or the diameter of a well comprising a cluster, or both, is between about 0.05-50, 0.05-10, 0.05-5, 0.05-4, 0.05-3, 0.05-2, 0.05-1, 0.05-0.5, 0.05-0.1, 0.1-10, 0.2-10, 0.3-10, 0.4-10, 0.5-10, 0.5-5, or 0.5-2 mm. In some instances, the diameter of a cluster or well or both is less than or about 5, 4, 3, 2, 1, 0.5, 0.1, 0.09, 0.08, 0.07, 0.06, or 0.05 mm. In some instances, the diameter of a cluster or well or both is between about 1.0 and 1.3 mm. In some instances, the diameter of a cluster or well, or both is about 1.150 mm. In some instances, the diameter of a cluster or well, or both is about 0.08 mm. The diameter of a cluster refers to clusters within a two-dimensional or three-dimensional substrate.

[0138] In some instances, the height of a well is from about 20-1000, 50-1000, 100-1000, 200-1000, 300-1000, 400-1000, or 500-1000 um. In some cases, the height of a well is less than about 1000, 900, 800, 700, or 600 um.

[0139] In some instances, a substrate comprises a plurality of channels corresponding to a plurality of loci within a cluster, wherein the height or depth of a channel is 5-500, 5-400, 5-300, 5-200, 5-100, 5-50, or 10-50 um. In some cases, the height of a channel is less than 100, 80, 60, 40, or 20 um.

[0140] In some instances, the diameter of a channel, locus (e.g., in a substantially planar substrate) or both channel and locus (e.g., in a three-dimensional substrate wherein a locus corresponds to a channel) is from about 1-1000, 1-500, 1-200, 1-100, 5-100, or 10-100 um, for example, to about 90, 80, 70, 60, 50, 40, 30, 20 or 10 um. In some instances, the diameter of a channel, locus, or both channel and locus is less than about 100, 90, 80, 70, 60, 50, 40, 30, 20 or 10 um. In some instances, the distance between the center of two adjacent channels, loci, or channels and loci is from about 1-500, 1-200, 1-100, 5-200, 5-100, 5-50, or 5-30, for example, to about 20 um.

[0141] Surface Modifications

[0142] Provided herein are methods for polynucleotide synthesis on a surface, wherein the surface comprises various surface modifications. In some instances, the surface modifications are employed for the chemical and/or physical alteration of a surface by an additive or subtractive process to change one or more chemical and/or physical properties of a substrate surface or a selected site or region of a substrate surface. For example, surface modifications include, without limitation, (1) changing the wetting properties of a surface, (2) functionalizing a surface, i.e., providing, modifying or substituting surface functional groups, (3) defunctionalizing a surface, i.e., removing surface functional groups, (4) otherwise altering the chemical composition of a surface, e.g., through etching, (5) increasing or decreasing surface roughness, (6) providing a coating on a surface, e.g., a coating that exhibits wetting properties that are different from the wetting properties of the surface, and/or (7) depositing particulates on a surface.

[0143] In some cases, the addition of a chemical layer on top of a surface (referred to as adhesion promoter) facilitates structured patterning of loci on a surface of a substrate. Exemplary surfaces for application of adhesion promotion include, without limitation, glass, silicon, silicon dioxide and silicon nitride. In some cases, the adhesion promoter is a chemical with a high surface energy. In some instances, a second chemical layer is deposited on a surface of a substrate. In some cases, the second chemical layer has a low surface energy. In some cases, surface energy of a chemical layer coated on a surface supports localization of droplets on the surface. Depending on the patterning arrangement selected, the proximity of loci and/or area of fluid contact at the loci are alterable.

[0144] In some instances, a substrate surface, or resolved loci, onto which nucleic acids or other moieties are deposited, e.g., for polynucleotide synthesis, are smooth or substantially planar (e.g., two-dimensional) or have irregularities, such as raised or lowered features (e.g., three-dimensional features). In some instances, a substrate surface is modified with one or more different layers of compounds. Such modification layers of interest include, without limitation, inorganic and organic layers such as metals, metal oxides, polymers, small organic molecules, and the like.

[0145] In some instances, resolved loci of a substrate are functionalized with one or more moieties that increase and/or decrease surface energy. In some cases, a moiety is chemically inert. In some cases, a moiety is configured to support a desired chemical reaction, for example, one or more processes in a polynucleotide synthesis reaction. The surface energy, or hydrophobicity, of a surface is a factor for determining the affinity of a nucleotide to attach onto the surface. In some instances, a method for substrate functionalization comprises: (a) providing a substrate having a surface that comprises silicon dioxide; and (b) silanizing the surface using a suitable silanizing agent described herein or otherwise known in the art, for example, an organofunctional alkoxysilane molecule. Methods and functionalizing agents are described in U.S. Pat. No. 5,474,796, which is herein incorporated by reference in its entirety.

[0146] In some instances, a substrate surface is functionalized by contact with a derivatizing composition that contains a mixture of silanes, under reaction conditions effective to couple the silanes to the substrate surface, typically via reactive hydrophilic moieties present on the substrate surface. Silanization generally covers a surface through self-assembly with organofunctional alkoxysilane molecules. A variety of siloxane functionalizing reagents can further be used as currently known in the art, e.g., for lowering or increasing surface energy. The organofunctional alkoxysilanes are classified according to their organic functions.

[0147] Polynucleotide Synthesis

[0148] Methods of the current disclosure for polynucleotide synthesis may include processes involving phosphoramidite chemistry. In some instances, polynucleotide synthesis comprises coupling a base with phosphoramidite. Polynucleotide synthesis may comprise coupling a base by deposition of phosphoramidite under coupling conditions, wherein the same base is optionally deposited with phosphoramidite more than once, i.e., double coupling. Polynucleotide synthesis may comprise capping of unreacted sites. In some instances, capping is optional. Polynucleotide synthesis may also comprise oxidation or an oxidation step or oxidation steps. Polynucleotide synthesis may comprise deblocking, detritylation, and sulfurization. In some instances, polynucleotide synthesis comprises either oxidation or sulfurization. In some instances, between one or each step during a polynucleotide synthesis reaction, the device is washed, for example, using tetrazole or acetonitrile. Time frames for any one step in a phosphoramidite synthesis method may be less than about 2 min, 1 min, 50 sec, 40 sec, 30 sec, 20 sec and 10 sec.

[0149] Polynucleotide synthesis using a phosphoramidite method may comprise a subsequent addition of a phosphoramidite building block (e.g., nucleoside phosphoramidite) to a growing polynucleotide chain for the formation of a phosphite triester linkage. Phosphoramidite polynucleotide synthesis proceeds in the 3′ to 5′ direction. Phosphoramidite polynucleotide synthesis allows for the controlled addition of one nucleotide to a growing nucleic acid chain per synthesis cycle. In some instances, each synthesis cycle comprises a coupling step. Phosphoramidite coupling involves the formation of a phosphite triester linkage between an activated nucleoside phosphoramidite and a nucleoside bound to the substrate, for example, via a linker. In some instances, the nucleoside phosphoramidite is provided to the device activated. In some instances, the nucleoside phosphoramidite is provided to the device with an activator. In some instances, nucleoside phosphoramidites are provided to the device in a 1.5, 2, 3, 4, 5, 6, 7, 8, 9, 10, 11, 12, 13, 14, 15, 16, 17, 18, 19, 20, 25, 30, 35, 40, 50, 60, 70, 80, 90, 100-fold excess or more over the substrate-bound nucleosides. In some instances, the addition of nucleoside phosphoramidite is performed in an anhydrous environment, for example, in anhydrous acetonitrile. Following addition of a nucleoside phosphoramidite, the device is optionally washed. In some instances, the coupling step is repeated one or more additional times, optionally with a wash step between nucleoside phosphoramidite additions to the substrate. In some instances, a polynucleotide synthesis method used herein comprises 1, 2, 3 or more sequential coupling steps. Prior to coupling, in many cases, the nucleoside bound to the device is de-protected by removal of a protecting group, where the protecting group functions to prevent polymerization. A common protecting group is 4,4′-dimethoxytrityl (DMT).

[0150] Following coupling, phosphoramidite polynucleotide synthesis methods optionally comprise a capping step. In a capping step, the growing polynucleotide is treated with a capping agent. A capping step is useful to block unreacted substrate-bound 5′-OH groups after coupling from further chain elongation, preventing the formation of polynucleotides with internal base deletions. Further, phosphoramidites activated with 1H-tetrazole may react, to a small extent, with the O6 position of guanosine. Without being bound by theory, upon oxidation with 12/water, this side product, possibly via O6-N7 migration, may undergo depurination. The apurinic sites may end up being cleaved in the course of the final deprotection of the polynucleotide thus reducing the yield of the full-length product. The O6 modifications may be removed by treatment with the capping reagent prior to oxidation with I₂/water. In some instances, inclusion of a capping step during polynucleotide synthesis decreases the error rate as compared to synthesis without capping. As an example, the capping step comprises treating the substrate-bound polynucleotide with a mixture of acetic anhydride and 1-methylimidazole. Following a capping step, the device is optionally washed.

[0151] In some instances, following addition of a nucleoside phosphoramidite, and optionally after capping and one or more wash steps, the device bound growing nucleic acid is oxidized. The oxidation step comprises a phosphite triester which is oxidized into a tetracoordinated phosphate triester, a protected precursor of the naturally occurring phosphate diester internucleoside linkage. In some instances, oxidation of the growing polynucleotide is achieved by treatment with iodine and water, optionally in the presence of a weak base (e.g., pyridine, lutidine, collidine). Oxidation may be carried out under anhydrous conditions using, e.g. tert-Butyl hydroperoxide or (1S)-(+)-(10-camphorsulfonyl)-oxaziridine (CSO). In some methods, a capping step is performed following oxidation. A second capping step allows for device drying, as residual water from oxidation that may persist can inhibit subsequent coupling. Following oxidation, the device and growing polynucleotide are optionally washed. In some instances, the step of oxidation is substituted with a sulfurization step to obtain polynucleotide phosphorothioates, wherein any capping steps can be performed after the sulfurization. Many reagents are capable of the efficient sulfur transfer, including but not limited to 3-(Dimethylaminomethylidene)amino)-3H-1,2,4-dithiazole-3-thione, DDTT, 3H-1,2-benzodithiol-3-one 1,1-dioxide, also known as Beaucage reagent, and N,N,N′N′-Tetraethylthiuram disulfide (TETD).

[0152] In order for a subsequent cycle of nucleoside incorporation to occur through coupling, the protected 5′ end of the device bound growing polynucleotide is removed so that the primary hydroxyl group is reactive with a next nucleoside phosphoramidite. In some instances, the protecting group is DMT and deblocking occurs with trichloroacetic acid in dichloromethane. Conducting detritylation for an extended time or with stronger than recommended solutions of acids may lead to increased depurination of solid support-bound polynucleotide and thus reduces the yield of the desired full-length product. Methods and compositions of the disclosure described herein provide for controlled deblocking conditions limiting undesired depurination reactions. In some instances, the device bound polynucleotide is washed after deblocking. In some instances, efficient washing after deblocking contributes to synthesized polynucleotides having a low error rate.

[0153] Methods for the synthesis of polynucleotides typically involve an iterating sequence of the following steps: application of a protected monomer to an actively functionalized surface (e.g., locus) to link with either the activated surface, a linker or with a previously deprotected monomer; deprotection of the applied monomer so that it is reactive with a subsequently applied protected monomer; and application of another protected monomer for linking. One or more intermediate steps include oxidation or sulfurization. In some instances, one or more wash steps precede or follow one or all of the steps.

[0154] Methods for phosphoramidite-based polynucleotide synthesis comprise a series of chemical steps. In some instances, one or more steps of a synthesis method involve reagent cycling, where one or more steps of the method comprise application to the device of a reagent useful for the step. For example, reagents are cycled by a series of liquid deposition and vacuum drying steps. For substrates comprising three-dimensional features such as wells, microwells, channels and the like, reagents are optionally passed through one or more regions of the device via the wells and/or channels.

[0155] Methods and systems described herein relate to polynucleotide synthesis devices for the synthesis of polynucleotides. The synthesis may be in parallel. For example, at least or about at least 2, 3, 4, 5, 6, 7, 8, 9, 10, 11, 12, 13, 14, 15, 16, 17, 18, 19, 20, 21, 22, 23, 24, 25, 30, 35, 40, 45, 50, 100, 150, 200, 250, 300, 350, 400, 450, 500, 550, 600, 650, 700, 750, 800, 850, 900, 1000, 10000, 50000, 75000, 100000 or more polynucleotides can be synthesized in parallel. The total number polynucleotides that may be synthesized in parallel may be from 2-100000, 3-50000, 4-10000, 5-1000, 6-900, 7-850, 8-800, 9-750, 10-700, 11-650, 12-600, 13-550, 14-500, 15-450, 16-400, 17-350, 18-300, 19-250, 20-200, 21-150,22-100, 23-50, 24-45, 25-40, 30-35. Those of skill in the art appreciate that the total number of polynucleotides synthesized in parallel may fall within any range bound by any of these values, for example 25-100. The total number of polynucleotides synthesized in parallel may fall within any range defined by any of the values serving as endpoints of the range. Total molar mass of polynucleotides synthesized within the device or the molar mass of each of the polynucleotides may be at least or at least about 10, 20, 30, 40, 50, 100, 250, 500, 750, 1000, 2000, 3000, 4000, 5000, 6000, 7000, 8000, 9000, 10000, 25000, 50000, 75000, 100000 picomoles, or more. The length of each of the polynucleotides or average length of the polynucleotides within the device may be at least or about at least 10, 15, 20, 25, 30, 35, 40, 45, 50, 100, 150, 200, 300, 400, 500 nucleotides, or more. The length of each of the polynucleotides or average length of the polynucleotides within the device may be at most or about at most 500, 400, 300, 200, 150, 100, 50, 45, 35, 30, 25, 20, 19, 18, 17, 16, 15, 14, 13, 12, 11, 10 nucleotides, or less. The length of each of the polynucleotides or average length of the polynucleotides within the device may fall from 10-500, 9-400, 11-300, 12-200, 13-150, 14-100, 15-50, 16-45, 17-40, 18-35, 19-25. Those of skill in the art appreciate that the length of each of the polynucleotides or average length of the polynucleotides within the device may fall within any range bound by any of these values, for example 100-300. The length of each of the polynucleotides or average length of the polynucleotides within the device may fall within any range defined by any of the values serving as endpoints of the range.

[0156] Methods for polynucleotide synthesis on a surface provided herein allow for synthesis at a fast rate. As an example, at least 3, 4, 5, 6, 7, 8, 9, 10, 11, 12, 13, 14, 15, 16, 17, 18, 19, 20, 21, 22, 23, 24, 25, 26, 27, 28, 29, 30, 35, 40, 45, 50, 55, 60, 70, 80, 90, 100, 125, 150, 175, 200 nucleotides per hour, or more are synthesized. Nucleotides include adenine, guanine, thymine, cytosine, uridine building blocks, or analogs/modified versions thereof. In some instances, libraries of polynucleotides are synthesized in parallel on substrate. For example, a device comprising about or at least about 100; 1,000; 10,000; 30,000; 75,000; 100,000; 1,000,000; 2,000,000; 3,000,000; 4,000,000; or 5,000,000 resolved loci is able to support the synthesis of at least the same number of distinct polynucleotides, wherein polynucleotide encoding a distinct sequence is synthesized on a resolved locus. In some instances, a library of polynucleotides is synthesized on a device with low error rates described herein in less than about three months, two months, one month, three weeks, 15, 14, 13, 12, 11, 10, 9, 8, 7, 6, 5, 4, 3, 2 days, 24 hours, or less. In some instances, larger nucleic acids assembled from a polynucleotide library synthesized with low error rate using the substrates and methods described herein are prepared in less than about three months, two months, one month, three weeks, 15, 14, 13, 12, 11, 10, 9, 8, 7, 6, 5, 4, 3, 2 days, 24 hours, or less.

[0157] In some instances, methods described herein provide for generation of a library of nucleic acids comprising variant nucleic acids differing at a plurality of codon sites. In some instances, a nucleic acid may have 1 site, 2 sites, 3 sites, 4 sites, 5 sites, 6 sites, 7 sites, 8 sites, 9 sites, 10 sites, 11 sites, 12 sites, 13 sites, 14 sites, 15 sites, 16 sites, 17 sites 18 sites, 19 sites, 20 sites, 30 sites, 40 sites, 50 sites, or more of variant codon sites.

[0158] In some instances, the one or more sites of variant codon sites may be adjacent. In some instances, the one or more sites of variant codon sites may not be adjacent but are separated by 1, 2, 3, 4, 5, 6, 7, 8, 9, 10, or more codons.

[0159] In some instances, a nucleic acid may comprise multiple sites of variant codon sites, wherein all the variant codon sites are adjacent to one another, forming a stretch of variant codon sites. In some instances, a nucleic acid may comprise multiple sites of variant codon sites, wherein none the variant codon sites are adjacent to one another. In some instances, a nucleic acid may comprise multiple sites of variant codon sites, wherein some the variant codon sites are adjacent to one another, forming a stretch of variant codon sites, and some of the variant codon sites are not adjacent to one another.

[0160] Referring to the Figures, FIG. 3 illustrates an exemplary process workflow for synthesis of nucleic acids (e.g., genes) from shorter nucleic acids. The workflow is divided generally into phases: (1) de novo synthesis of a single stranded nucleic acid library, (2) joining nucleic acids to form larger fragments, (3) error correction, (4) quality control, and (5) shipment. Prior to de novo synthesis, an intended nucleic acid sequence or group of nucleic acid sequences is preselected. For example, a group of genes is preselected for generation.

[0161] Once large nucleic acids for generation are selected, a predetermined library of nucleic acids is designed for de novo synthesis. Various suitable methods are known for generating high density polynucleotide arrays. In the workflow example, a device surface layer is provided. In the example, chemistry of the surface is altered in order to improve the polynucleotide synthesis process. Areas of low surface energy are generated to repel liquid while areas of high surface energy are generated to attract liquids. The surface itself may be in the form of a planar surface or contain variations in shape, such as protrusions or microwells which increase surface area. In the workflow example, high surface energy molecules selected serve a dual function of supporting DNA chemistry, as disclosed in International Patent Application Publication WO/2015/021080, which is herein incorporated by reference in its entirety.

[0162] In situ preparation of polynucleotide arrays is generated on a solid support and utilizes single nucleotide extension process to extend multiple oligomers in parallel. A deposition device, such as a material deposition device, is designed to release reagents in a step-wise fashion such that multiple polynucleotides extend, in parallel, one residue at a time to generate oligomers with a predetermined nucleic acid sequence 302. In some instances, polynucleotides are cleaved from the surface at this stage. Cleavage includes gas cleavage, e.g., with ammonia or methylamine.

[0163] The generated polynucleotide libraries are placed in a reaction chamber. In this exemplary workflow, the reaction chamber (also referred to as “nanoreactor”) is a silicon coated well, containing PCR reagents and lowered onto the polynucleotide library 303. Prior to or after the sealing 304 of the polynucleotides, a reagent is added to release the polynucleotides from the substrate. In the exemplary workflow, the polynucleotides are released subsequent to sealing of the nanoreactor 305. Once released, fragments of single stranded polynucleotides hybridize in order to span an entire long-range sequence of DNA. Partial hybridization 305 is possible because each synthesized polynucleotide is designed to have a small portion overlapping with at least one other polynucleotide in the pool.

[0164] After hybridization, a PCA reaction is commenced. During the polymerase cycles, the polynucleotides anneal to complementary fragments and gaps are filled in by a polymerase. Each cycle increases the length of various fragments randomly depending on which polynucleotides find each other. Complementarity amongst the fragments allows for formation of a complete large span of double stranded DNA 306.

[0165] After PCA is complete, the nanoreactor is separated from the device 307 and positioned for interaction with a device having primers for PCR 308. After sealing, the nanoreactor is subject to PCR 309 and the larger nucleic acids are amplified. After PCR 310, the nanochamber is opened 311, error correction reagents are added 312, the chamber is sealed 313 and an error correction reaction occurs to remove mismatched base pairs and/or strands with poor complementarity from the double stranded PCR amplification products 314. The nanoreactor is opened and separated 315. Error corrected product is next subject to additional processing steps, such as PCR and molecular bar coding, and then packaged 322 for shipment 323.

[0166] In some instances, quality control measures are taken. After error correction, quality control steps include for example interaction with a wafer having sequencing primers for amplification of the error corrected product 316, sealing the wafer to a chamber containing error corrected amplification product 317, and performing an additional round of amplification 318. The nanoreactor is opened 319 and the products are pooled 320 and sequenced 321. After an acceptable quality control determination is made, the packaged product 322 is approved for shipment 323.

[0167] In some instances, a nucleic acid generated by a workflow such as that in FIG. 3 is subject to mutagenesis using overlapping primers disclosed herein. In some instances, a library of primers is generated by in situ preparation on a solid support and utilize single nucleotide extension process to extend multiple oligomers in parallel. A deposition device, such as a material deposition device, is designed to release reagents in a step wise fashion such that multiple polynucleotides extend, in parallel, one residue at a time to generate oligomers with a predetermined nucleic acid sequence 302.

[0168] Computer Systems

[0169] Any of the systems described herein, may be operably linked to a computer and may be automated through a computer either locally or remotely. In various instances, the methods and systems of the disclosure may further comprise software programs on computer systems and use thereof. Accordingly, computerized control for the synchronization of the dispense/vacuum/refill functions such as orchestrating and synchronizing the material deposition device movement, dispense action and vacuum actuation are within the bounds of the disclosure. The computer systems may be programmed to interface between the user specified base sequence and the position of a material deposition device to deliver the correct reagents to specified regions of the substrate.

[0170] The computer system 400 illustrated in FIG. 4 may be understood as a logical apparatus that can read instructions from media 411 and/or a network port 405, which can optionally be connected to server 409 having fixed media 412. The system, such as shown in FIG. 4 can include a CPU 401, disk drives 403, optional input devices such as keyboard 415 and/or mouse 416 and optional monitor 407. Data communication can be achieved through the indicated communication medium to a server at a local or a remote location. The communication medium can include any means of transmitting and/or receiving data. For example, the communication medium can be a network connection, a wireless connection or an internet connection. Such a connection can provide for communication over the World Wide Web. It is envisioned that data relating to the present disclosure can be transmitted over such networks or connections for reception and/or review by a party 422 as illustrated in FIG. 4.

[0171] FIG. 5 is a block diagram illustrating a first example architecture of a computer system 500 that can be used in connection with example instances of the present disclosure. As depicted in FIG. 5, the example computer system can include a processor 502 for processing instructions. Non-limiting examples of processors include: Intel Xeon™ processor, AMD Opteron™ processor, Samsung 32-bit RISC ARM 1176JZ(F)-S v1.0™ processor, ARM Cortex-A8 Samsung S5PC100™ processor, ARM Cortex-A8 Apple A4™ processor, Marvell PXA 930™ processor, or a functionally-equivalent processor. Multiple threads of execution can be used for parallel processing. In some instances, multiple processors or processors with multiple cores can also be used, whether in a single computer system, in a cluster, or distributed across systems over a network comprising a plurality of computers, cell phones, and/or personal data assistant devices.

[0172] As illustrated in FIG. 5, a high-speed cache 504 can be connected to, or incorporated in, the processor 502 to provide a high speed memory for instructions or data that have been recently, or are frequently, used by the processor 502. The processor 502 is connected to a north bridge 506 by a processor bus 508. The north bridge 506 is connected to random access memory (RAM) 510 by a memory bus 512 and manages access to the RAM 510 by the processor 502. The north bridge 506 is also connected to a south bridge 514 by a chipset bus 516. The south bridge 514 is, in turn, connected to a peripheral bus 518. The peripheral bus can be, for example, PCI, PCI-X, PCI Express, or other peripheral bus. The north bridge and south bridge are often referred to as a processor chipset and manage data transfer between the processor, RAM, and peripheral components on the peripheral bus 518. In some alternative architectures, the functionality of the north bridge can be incorporated into the processor instead of using a separate north bridge chip. In some instances, system 500 can include an accelerator card 522 attached to the peripheral bus 518. The accelerator can include field programmable gate arrays (FPGAs) or other hardware for accelerating certain processing. For example, an accelerator can be used for adaptive data restructuring or to evaluate algebraic expressions used in extended set processing.

[0173] Software and data are stored in external storage 524 and can be loaded into RAM 510 and/or cache 504 for use by the processor. The system 500 includes an operating system for managing system resources; non-limiting examples of operating systems include: Linux, Windows™, MACOS™, BlackBerry OS™, iOS™, and other functionally-equivalent operating systems, as well as application software running on top of the operating system for managing data storage and optimization in accordance with example instances of the present disclosure. In this example, system 500 also includes network interface cards (NICs) 520 and 521 connected to the peripheral bus for providing network interfaces to external storage, such as Network Attached Storage (NAS) and other computer systems that can be used for distributed parallel processing.

[0174] FIG. 6 is a diagram showing a network 600 with a plurality of computer systems 602a, and 602b, a plurality of cell phones and personal data assistants 602c, and Network Attached Storage (NAS) 604a, and 604b. In example instances, systems 602a, 602b, and 602c can manage data storage and optimize data access for data stored in Network Attached Storage (NAS) 604a and 604b. A mathematical model can be used for the data and be evaluated using distributed parallel processing across computer systems 602a, and 602b, and cell phone and personal data assistant systems 602c. Computer systems 602a, and 602b, and cell phone and personal data assistant systems 602c can also provide parallel processing for adaptive data restructuring of the data stored in Network Attached Storage (NAS) 604a and 604b. FIG. 6 illustrates an example only, and a wide variety of other computer architectures and systems can be used in conjunction with the various instances of the present disclosure. For example, a blade server can be used to provide parallel processing. Processor blades can be connected through a back plane to provide parallel processing. Storage can also be connected to the back plane or as Network Attached Storage (NAS) through a separate network interface. In some example instances, processors can maintain separate memory spaces and transmit data through network interfaces, back plane or other connectors for parallel processing by other processors. In other instances, some or all of the processors can use a shared virtual address memory space.

[0175] FIG. 7 is a block diagram of a multiprocessor computer system 700 using a shared virtual address memory space in accordance with an example instance. The system includes a plurality of processors 702a-f that can access a shared memory subsystem 704. The system incorporates a plurality of programmable hardware memory algorithm processors (MAPs) 706a-f in the memory subsystem 704. Each MAP 706a-f can comprise a memory 708a-f and one or more field programmable gate arrays (FPGAs) 710a-f. The MAP provides a configurable functional unit and particular algorithms or portions of algorithms can be provided to the FPGAs 710a-f for processing in close coordination with a respective processor. For example, the MAPs can be used to evaluate algebraic expressions regarding the data model and to perform adaptive data restructuring in example instances. In this example, each MAP is globally accessible by all of the processors for these purposes. In one configuration, each MAP can use Direct Memory Access (DMA) to access an associated memory 708a-f, allowing it to execute tasks independently of, and asynchronously from the respective microprocessor 702a-f. In this configuration, a MAP can feed results directly to another MAP for pipelining and parallel execution of algorithms.

[0176] The above computer architectures and systems are examples only, and a wide variety of other computer, cell phone, and personal data assistant architectures and systems can be used in connection with example instances, including systems using any combination of general processors, co-processors, FPGAs and other programmable logic devices, system on chips (SOCs), application specific integrated circuits (ASICs), and other processing and logic elements. In some instances, all or part of the computer system can be implemented in software or hardware. Any variety of data storage media can be used in connection with example instances, including random access memory, hard drives, flash memory, tape drives, disk arrays, Network Attached Storage (NAS) and other local or distributed data storage devices and systems.

[0177] In example instances, the computer system can be implemented using software modules executing on any of the above or other computer architectures and systems. In other instances, the functions of the system can be implemented partially or completely in firmware, programmable logic devices such as field programmable gate arrays (FPGAs) as referenced in FIG. 5, system on chips (SOCs), application specific integrated circuits (ASICs), or other processing and logic elements. For example, the Set Processor and Optimizer can be implemented with hardware acceleration through the use of a hardware accelerator card, such as accelerator card 522 illustrated in FIG. 5.

[0178] The following examples are set forth to illustrate more clearly the principle and practice of embodiments disclosed herein to those skilled in the art and are not to be construed as limiting the scope of any claimed embodiments. Unless otherwise stated, all parts and percentages are on a weight basis.

### EXAMPLES

[0179] The following examples are given for the purpose of illustrating various embodiments of the disclosure and are not meant to limit the present disclosure in any fashion. The present examples, along with the methods described herein are presently representative of preferred embodiments, are exemplary, and are not intended as limitations on the scope of the disclosure. Changes therein and other uses which are encompassed within the spirit of the disclosure as defined by the scope of the claims will occur to those skilled in the art.

### Example 1: Functionalization of a Device Surface

[0180] A device was functionalized to support the attachment and synthesis of a library of polynucleotides. The device surface was first wet cleaned using a piranha solution comprising 90% H₂SO₄ and 10% H₂O₂ for 20 minutes. The device was rinsed in several beakers with DI water, held under a DI water gooseneck faucet for 5 min, and dried with N₂. The device was subsequently soaked in NH₄OH (1:100; 3 mL:300 mL) for 5 min, rinsed with DI water using a handgun, soaked in three successive beakers with DI water for 1 min each, and then rinsed again with DI water using the handgun. The device was then plasma cleaned by exposing the device surface to O₂. A SAMCO PC-300 instrument was used to plasma etch O₂ at 250 watts for 1 min in downstream mode.

[0181] The cleaned device surface was actively functionalized with a solution comprising N-(3-triethoxysilylpropyl)-4-hydroxybutyramide using a YES-1224P vapor deposition oven system with the following parameters: 0.5 to 1 torr, 60 min, 70° C., 135° C. vaporizer. The device surface was resist coated using a Brewer Science 200X spin coater. SPR™ 3612 photoresist was spin coated on the device at 2500 rpm for 40 sec. The device was pre-baked for 30 min at 90° C. on a Brewer hot plate. The device was subjected to photolithography using a Karl Suss MA6 mask aligner instrument. The device was exposed for 2.2 sec and developed for 1 min in MSF 26A. Remaining developer was rinsed with the handgun and the device soaked in water for 5 min. The device was baked for 30 min at 100° C. in the oven, followed by visual inspection for lithography defects using a Nikon L200. A descum process was used to remove residual resist using the SAMCO PC-300 instrument to O₂ plasma etch at 250 watts for 1 min.

[0182] The device surface was passively functionalized with a 100 μL solution of perfluorooctyltrichlorosilane mixed with 10 μL light mineral oil. The device was placed in a chamber, pumped for 10 min, and then the valve was closed to the pump and left to stand for 10 min. The chamber was vented to air. The device was resist stripped by performing two soaks for 5 min in 500 mL NMP at 70° C. with ultrasonication at maximum power (9 on Crest system). The device was then soaked for 5 min in 500 mL isopropanol at room temperature with ultrasonication at maximum power. The device was dipped in 300 mL of 200 proof ethanol and blown dry with N₂. The functionalized surface was activated to serve as a support for polynucleotide synthesis.

### Example 2: Synthesis of a 50-mer Sequence on an Oligonucleotide Synthesis Device

[0183] A two-dimensional oligonucleotide synthesis device was assembled into a flowcell, which was connected to a flowcell (Applied Biosystems (AB1394 DNA Synthesizer”). The two-dimensional oligonucleotide synthesis device was uniformly functionalized with N-(3-TRIETHOXYSILYLPROPYL)-4-HYDROXYBUTYRAMIDE (Gelest) which was used to synthesize an exemplary polynucleotide of 50 bp (“50-mer polynucleotide”) using polynucleotide synthesis methods described herein.

[0184] The sequence of the 50-mer was as described in SEQ ID NO: 2644. 5′AGACAATCAACCATTTGGGGTGGACAGCCTTGACCTCTAGACTTCGGCAT ##TTTTTTT TTT3′ (SEQ ID NO.: 2644), where #denotes Thymidine-succinyl hexamide CED phosphoramidite (CLP-2244 from ChemGenes), which is a cleavable linker enabling the release of oligos from the surface during deprotection.

[0185] The synthesis was done using standard DNA synthesis chemistry (coupling, capping, oxidation, and deblocking) according to the protocol in Table 1 and an ABI synthesizer.

TABLE 1
Synthesis protocols

| General DNA Synthesis | Table 1 | |
|---|---|---|
| Process Name | Process Step | Time (sec) |
| WASH (Acetonitrile Wash | Acetonitrile System Flush | 4 |
| Flow) | Acetonitrile to Flowcell | 23 |
| | N2 System Flush | 4 |
| | Acetonitrile System Flush | 4 |
| DNA BASE ADDITION | Activator Manifold Flush | 2 |
| (Phosphoramidite + | Activator to Flowcell | 6 |
| Activator Flow) | Activator + | 6 |
| | Phosphoramidite to | |
| | Flowcell | |
| | Activator to Flowcell | 0.5 |
| | Activator + | 5 |
| | Phosphoramidite to | |
| | Flowcell | |
| | Activator to Flowcell | 0.5 |
| | Activator + | 5 |
| | Phosphoramidite to | |
| | Flowcell | |
| | Activator to Flowcell | 0.5 |
| | Activator + | 5 |
| | Phosphoramidite to | |
| | Flowcell | |
| | Incubate for 25 sec | 25 |
| WASH (Acetonitrile Wash | Acetonitrile System Flush | 4 |
| Flow) | Acetonitrile to Flowcell | 15 |
| | N2 System Flush | 4 |
| | Acetonitrile System Flush | 4 |
| DNA BASE ADDITION | Activator Manifold Flush | 2 |
| (Phosphoramidite + | Activator to Flowcell | 5 |
| Activator Flow) | Activator + | 18 |
| | Phosphoramidite to | |
| | Flowcell | |
| | Incubate for 25 sec | 25 |
| WASH (Acetonitrile Wash | Acetonitrile System Flush | 4 |
| Flow) | Acetonitrile to Flowcell | 15 |
| | N2 System Flush | 4 |
| | Acetonitrile System Flush | 4 |
| CAPPING (CapA + B, 1:1, | CapA + B to Flowcell | 15 |
| Flow) | | |
| WASH (Acetonitrile Wash | Acetonitrile System Flush | 4 |
| Flow) | Acetonitrile to Flowcell | 15 |
| | Acetonitrile System Flush | 4 |
| OXIDATION (Oxidizer | Oxidizer to Flowcell | 18 |
| Flow) | | |
| WASH (Acetonitrile Wash | Acetonitrile System Flush | 4 |
| Flow) | N2 System Flush | 4 |
| | Acetonitrile System Flush | 4 |
| | Acetonitrile to Flowcell | 15 |
| | Acetonitrile System Flush | 4 |
| | Acetonitrile to Flowcell | 15 |
| | N2 System Flush | 4 |
| | Acetonitrile System Flush | 4 |
| | Acetonitrile to Flowcell | 23 |
| | N2 System Flush | 4 |
| | Acetonitrile System Flush | 4 |
| DEBLOCKING (Deblock | Deblock to Flowcell | 36 |
| Flow) | | |
| WASH (Acetonitrile Wash | Acetonitrile System Flush | 4 |
| Flow) | N2 System Flush | 4 |
| | Acetonitrile System Flush | 4 |
| | Acetonitrile to Flowcell | 18 |
| | N2 System Flush | 4.13 |
| | Acetonitrile System Flush | 4.13 |
| | Acetonitrile to Flowcell | 15 |

[0186] The phosphoramidite/activator combination was delivered similarly to the delivery of bulk reagents through the flowcell. No drying steps were performed as the environment stays “wet” with reagent the entire time.

[0187] The flow restrictor was removed from the ABI 394 synthesizer to enable faster flow. Without flow restrictor, flow rates for amidites (0.1 M in ACN), Activator, (0.25M Benzoylthiotetrazole (“BTT”; 30-3070-xx from GlenResearch) in ACN), and Ox (0.02M I2 in 20% pyridine, 10% water, and 70% THF) were roughly ˜100 uL/sec, for acetonitrile (“ACN”) and capping reagents (1:1 mix of CapA and CapB, wherein CapA is acetic anhydride in THF/Pyridine and CapB is 16% 1-methylimidizole in THF), roughly ˜200 uL/sec, and for Deblock (3% dichloroacetic acid in toluene), roughly ˜300 uL/sec (compared to ˜50 uL/sec for all reagents with flow restrictor). The time to completely push out Oxidizer was observed, the timing for chemical flow times was adjusted accordingly and an extra ACN wash was introduced between different chemicals. After polynucleotide synthesis, the chip was deprotected in gaseous ammonia overnight at 75 psi. Five drops of water were applied to the surface to recover polynucleotides. The recovered polynucleotides were then analyzed on a BioAnalyzer small RNA chip.

### Example 3: Synthesis of a 100-mer Sequence on an Oligonucleotide Synthesis Device

[0188] The same process as described in Example 2 for the synthesis of the 50-mer sequence was used for the synthesis of a 100-mer polynucleotide (“100-mer polynucleotide”; 5′ CGGGATCCTTATCGTCATCGTCGTACAGATCCCGACCCATTTGCTGTCCACCAGTCATG CTAGCCATACCATGATGATGATGATGATGAGAACCCCGCAT ##TTTTTTTTTT3′, where #denotes Thymidine-succinyl hexamide CED phosphoramidite (CLP-2244 from ChemGenes); SEQ ID NO.: 2645) on two different silicon chips, the first one uniformly functionalized with N-(3-TRIETHOXYSILYLPROPYL)-4-HYDROXYBUTYRAMIDE and the second one functionalized with 5/95 mix of 11-acetoxyundecyltriethoxysilane and n-decyltriethoxysilane, and the polynucleotides extracted from the surface were analyzed on a BioAnalyzer instrument.

[0189] All ten samples from the two chips were further PCR amplified using a forward (5′ATGCGGGGTTCTCATCATC3′; SEQ ID NO.: 2646) and a reverse (5′CGGGATCCTTATCGTCATCG3′; SEQ ID NO.: 2647) primer in a 50 uL PCR mix (25 uL NEB Q5 mastermix, 2.5 uL 10 uM Forward primer, 2.5 uL 10 uM Reverse primer, 1 uL polynucleotide extracted from the surface, and water up to 50 uL) using the following thermalcycling program:
[0190] 98° C., 30 sec
[0191] 98° C., 10 sec; 63° C., 10 sec; 72° C., 10 sec; repeat 12 cycles
[0192] 72° C., 2 min

[0193] The PCR products were also run on a BioAnalyzer, demonstrating sharp peaks at the 100-mer position. Next, the PCR amplified samples were cloned, and Sanger sequenced. Table 2 summarizes the results from the Sanger sequencing for samples taken from spots 1-5 from chip 1 and for samples taken from spots 6-10 from chip 2.

TABLE 2
Sequencing results

| Spot | Error rate | Cycle efficiency |
|---|---|---|
| 1 | 1/763 bp | 99.87% |
| 2 | 1/824 bp | 99.88% |
| 3 | 1/780 bp | 99.87% |
| 4 | 1/429 bp | 99.77% |
| 5 | 1/1525 bp | 99.93% |
| 6 | 1/1615 bp | 99.94% |
| 7 | 1/531 bp | 99.81% |
| 8 | 1/1769 bp | 99.94% |
| 9 | 1/854 bp | 99.88% |
| 10 | 1/1451 bp | 99.93% |

[0194] Thus, the high quality and uniformity of the synthesized polynucleotides were repeated on two chips with different surface chemistries. Overall, 89% of the 100-mers that were sequenced were perfect sequences with no errors, corresponding to 233 out of 262.

[0195] Table 3 summarizes error characteristics for the sequences obtained from the polynucleotide samples from spots 1-10.

TABLE 3
Error characteristics

| Sample | OSA_0 | OSA_0 | OSA_0 | OSA_0 | OSA_0 | OSA_0 | OSA_0 | OSA_0 | OSA_0 | OSA_00 |
|---|---|---|---|---|---|---|---|---|---|---|
| ID/Spot no. | 046/1 | 047/2 | 048/3 | 049/4 | 050/5 | 051/6 | 052/7 | 053/8 | 054/9 | 55/10 |
| Total | 32 | 32 | 32 | 32 | 32 | 32 | 32 | 32 | 32 | 32 |
| Sequences | | | | | | | | | | |
| Sequencing | 25 of | 27 of | 26 of | 21 of | 25 of | 29 of | 27 of | 29 of | 28 of | 25 of 28 |
| Quality | 28 | 27 | 30 | 23 | 26 | 30 | 31 | 31 | 29 | |
| Oligo | 23 of | 25 of | 22 of | 18 of | 24 of | 25 of | 22 of | 28 of | 26 of | 20 of 25 |
| Quality | 25 | 27 | 26 | 21 | 25 | 29 | 27 | 29 | 28 | |
| ROI | 2500 | 2698 | 2561 | 2122 | 2499 | 2666 | 2625 | 2899 | 2798 | 2348 |
| Match | | | | | | | | | | |
| Count | | | | | | | | | | |
| ROI | 2 | 2 | 1 | 3 | 1 | 0 | 2 | 1 | 2 | 1 |
| Mutation | | | | | | | | | | |
| ROI Multi | 0 | 0 | 0 | 0 | 0 | 0 | 0 | 0 | 0 | 0 |
| Base | | | | | | | | | | |
| Deletion | | | | | | | | | | |
| ROI Small | 1 | 0 | 0 | 0 | 0 | 0 | 0 | 0 | 0 | 0 |
| Insertion | | | | | | | | | | |
| ROI | 0 | 0 | 0 | 0 | 0 | 0 | 0 | 0 | 0 | 0 |
| Single | | | | | | | | | | |
| Base | | | | | | | | | | |
| Deletion | | | | | | | | | | |
| Large | 0 | 0 | 1 | 0 | 0 | 1 | 1 | 0 | 0 | 0 |
| Deletion | | | | | | | | | | |
| Count | | | | | | | | | | |
| Mutation: | 2 | 2 | 1 | 2 | 1 | 0 | 2 | 1 | 2 | 1 |
| G > A | | | | | | | | | | |
| Mutation: | 0 | 0 | 0 | 1 | 0 | 0 | 0 | 0 | 0 | 0 |
| T > C | | | | | | | | | | |
| ROI Error | 3 | 2 | 2 | 3 | 1 | 1 | 3 | 1 | 2 | 1 |
| Count | | | | | | | | | | |
| ROI Error | Err: ~1 | Err: ~1 | Err: ~1 | Err: ~1 | Err: ~1 | Err: ~1 | Err: ~1 | Err: ~1 | Err: ~1 | Err: ~1 |
| Rate | in 834 | in 1350 | in 1282 | in 708 | in 2500 | in 2667 | in 876 | in 2900 | in 1400 | in 2349 |
| ROI Minus | MP Err: | MP Err: | MP Err: | MP Err: | MP Err: | MP Err: | MP Err: | MP Err: | MP Err: | MP Err: |
| Primer | ~1 in | ~1 in | ~1 in | ~1 in | ~1 in | ~1 in | ~1 in | ~1 in | ~1 in | ~1 in |
| Error Rate | 763 | 824 | 780 | 429 | 1525 5 | 1615 | 531 | 1769 | 854 | 1451 |

### Example 4: Sequence Data

[0196] Variable heavy chain and light chain domains of anti-cytokine antibodies were reformatted to IgG2, or VHH-Fc based on IgG2 Fc for nanobody leads. Reformatted leads were then DNA back-translated, synthesized, and cloned into mammalian expression vector pTwist CMV BG WPRE Neo utilizing the Twist Bioscience eCommerce portal. Light chain variable domains were reformatted into kappa and lambda frameworks accordingly. Clonal genes were delivered as purified plasmid DNA ready for transient transfection in HEK Expi293 cells (Thermo Fisher Scientific). Cultures in a volume of 1.2 mL were grown to four days, harvested and purified using Protein A resin (PhyNexus) on the Hamilton Microlab STAR platform into 43 mM Citrate 148 mM HEPES, pH 6. 1.2 ml yield was calculated by measuring absorbance at 280 nm on Lunatic instrumentation (UNCLE).

[0197] SPR experiments were performed on a Carterra LSA SPR biosensor equipped with a HC30M chip at 25° C. in HBS-TE. Antibodies were diluted to 10 μg/mL and amine-coupled to the sensor chip by EDC/NHS activation, followed by ethanolamine HCl quenching. Increasing concentrations of analyte were flowed over the sensor chip in HBS-TE with 0.5 mg/mL BSA with 5-minute association and 15-minute dissociation. Following each injection cycle the surface was regenerated with 2× 30-second injections of IgG elution buffer (Thermo). Data were analyzed in Carterra's Kinetics Tool software with 1:1 binding model.

[0198] Antibodies were tested in a binding assay coupled to flow cytometry analysis as follows: cytokine over-expressing Expi293 cells and Expi293 parent cells were incubated with 100 nM IgG for 1 h on ice, washed three times and incubated with Alexa 647 conjugated goat-anti-human antibody (1:200) (Jackson ImmunoResearch Laboratories, 109-605-044) for 30 min on ice, followed by three washes, centrifuging to pellet the cells between each washing step. All incubations and washes were in buffer containing PBS+1% BSA. MFI Ratio is defined by the mean fluorescence intensity (MFI) of the cytokine over-expressing Expi293 cell over the Expi293 parent cell. For titrations, antibodies were serially diluted 1:3 starting from 100 nM down to 0.046 nM. Cells were analyzed by flow cytometry and hits (i.e., an antibody that specifically binds to the cytokine over-expressing Expi293 cells) were identified by measuring the GFP signal against the Alexa 647 signal. EC50 was calculated in GraphPad Prism.

TABLE 4
Data for TSLP

| | | | | | | 100 nM | EC50 |
|---|---|---|---|---|---|---|---|
| TSLP | | kon (M-1 | | | Rmax | (MFI | FACS |
| Variant | yield | s-1) | koff (s-1) | KD (M) | (RU) | Ratio) | (nM) |
| TSLP-1 | 140.4 | n.b. | n.b. | n.b. | n.b. | 75.10 | |
| TSLP-2 | 241.02 | 2.78E+05 | 1.80E−03 | 6.49E−09 | 609.2 | 217.60 | 0.43 |
| TSLP-3 | 56.16 | 5.99E+04 | 1.14E−03 | 1.91E−08 | 308.4 | 80.10 | 0.37 |
| TSLP-4 | 311.22 | 7.59E+04 | 5.42E−04 | 7.14E−09 | 781.8 | 157.40 | 0.18 |
| TSLP-5 | 266.76 | 3.10E+04 | 7.59E−04 | 2.45E−08 | 703.5 | 149.00 | 0.73 |
| TSLP-6 | 271.44 | 3.47E+04 | 6.72E−04 | 1.94E−08 | 462.3 | 177.50 | |
| TSLP-7 | 170.82 | 6.85E+04 | 3.51E−04 | 5.12E−09 | 196.5 | 1.60 | |
| TSLP-8 | 2.34 | n.b. | n.b. | n.b. | n.b. | 15.80 | |
| TSLP-9 | 63.18 | 4.86E+04 | 1.51E−03 | 3.10E−08 | 386.7 | 8.60 | 0.73 |
| TSLP-10 | 142.74 | 9.55E+04 | 8.05E−04 | 8.43E−09 | 285.7 | 67.80 | 1.4 |
| TSLP-11 | 301.86 | 4.47E+04 | 4.33E−04 | 9.67E−09 | 682.6 | 156.90 | |
| TSLP-12 | 140.4 | 9.87E+04 | 1.37E−03 | 1.39E−08 | 244.9 | 76.20 | 0.5 |
| TSLP-13 | 241.02 | 3.16E+04 | 1.30E−03 | 4.13E−08 | 303.9 | 120.40 | 0.37 |
| TSLP-14 | 152.1 | 5.10E+04 | 1.60E−03 | 3.14E−08 | 406.6 | 20.30 | 0.18 |
| TSLP-15 | 60.84 | | | | | 1.50 | |
| TSLP-16 | 109.98 | 1.20E+05 | 1.43E−03 | 1.19E−08 | 515.5 | 10.00 | 0.58 |
| TSLP-17 | 238.68 | 3.75E+04 | 4.20E−04 | 1.12E−08 | 57.0 | 153.80 | 0.12 |
| TSLP-18 | 67.86 | 7.97E+04 | 1.78E−03 | 2.23E−08 | 372.4 | 5.10 | |
| TSLP-19 | 16.38 | n.b. | n.b. | n.b. | n.b. | 505.80 | |
| TSLP-20 | 203.58 | 7.53E+04 | 2.09E−03 | 2.77E−08 | 404.4 | 2.50 | |
| TSLP-21 | 37.44 | 1.06E+05 | 1.13E−03 | 1.06E−08 | 559.0 | 0.70 | |
| TSLP-22 | 124.02 | 8.82E+04 | 1.06E−03 | 1.21E−08 | 371.6 | 90.40 | 0.66 |
| TSLP-23 | 231.66 | 6.85E+04 | 1.31E−03 | 1.91E−08 | 775.9 | 226.40 | 0.12 |
| TSLP-24 | 70.2 | 4.36E+04 | 4.45E−04 | 1.02E−08 | 604.6 | 1.30 | |
| TSLP-25 | 182.52 | | | | | 2.60 | |
| TSLP-26 | 21.06 | 4.47E+04 | 2.28E−04 | 5.09E−09 | 258.1 | 312.80 | 3.37 |
| TSLP-27 | 102.96 | | | | | 0.60 | |
| TSLP-28 | 184.86 | | | | | 0.70 | |
| TSLP-29 | 2.34 | n.b. | n.b. | n.b. | n.b. | 780.10 | |
| TSLP-30 | 119.34 | 1.58E+04 | 9.96E−04 | 6.32E−08 | 478.9 | 104.60 | 0.43 |
| TSLP-31 | 7.02 | | | | | 18.40 | |
| TSLP-32 | 306.54 | 1.67E+05 | 1.21E−03 | 7.24E−09 | 540.4 | 194.80 | 0.45 |
| TSLP-33 | 65.52 | | | | | 21.00 | |
| TSLP-34 | 7.02 | | | | | 16.50 | |
| TSLP-35 | 112.32 | 7.26E+04 | 1.45E−03 | 2.00E−08 | 958.5 | 107.60 | 0.28 |
| TSLP-36 | 147.42 | 1.44E+05 | 4.87E−04 | 3.39E−09 | 619.5 | 100.50 | 0.11 |
| TSLP-37 | 4.68 | | | | | 17.10 | |
| TSLP-38 | 154.44 | 4.83E+04 | 4.87E−04 | 1.01E−08 | 413.6 | 89.30 | 0.31 |
| TSLP-39 | | | | | | | |
| TSLP-40 | 245.7 | 2.56E+04 | 4.93E−04 | 1.93E−08 | 462.4 | 287.70 | 0.14 |
| TSLP-41 | 58.5 | 1.64E+05 | 1.77E−03 | 1.08E−08 | 181.9 | 12.30 | |
| TSLP-42 | 189.54 | n.b. | n.b. | n.b. | n.b. | 21.60 | |
| TSLP-43 | 329.94 | | | | | | |
| TSLP-44 | 400.14 | | | | | | |
| TSLP-45 | 266.76 | | | | | | |
| TSLP-46 | 212.94 | | | | | | |
| TSLP-47 | 56.16 | | | | | | |
| TSLP-48 | 231.66 | | | | | | |
| TSLP-49 | 98.28 | | | | | | |
| TSLP-50 | 56.16 | | | | | | |
| TSLP-51 | 23.4 | | | | | | |
| TSLP-52 | 208.26 | | | | | | |
| TSLP-53 | 362.7 | | | | | | |
| TSLP-54 | 63.18 | | | | | | |
| TSLP-55 | 372.06 | | | | | | |
| TSLP-56 | 42.12 | | | | | | |
| TSLP-57 | 453.96 | | | | | | |
| TSLP-58 | 432.9 | | | | | | |
| TSLP-59 | 224.64 | | | | | | |
| TSLP-60 | 271.44 | | | | | | |
| TSLP-61 | 219.96 | | | | | | |
| TSLP-62 | 315.9 | | | | | | |
| TSLP-63 | 339.3 | | | | | | |
| TSLP-64 | 397.8 | | | | | | |
| TSLP-65 | 351 | | | | | | |
| TSLP-66 | 259.74 | | | | | | |
| TSLP-67 | 369.72 | | | | | | |
| TSLP-68 | 7.02 | | | | | | |
| TSLP-69 | 402.48 | | | | | | |
| TSLP-70 | 416.52 | | | | | | |
| TSLP-71 | 0 | | | | | | |
| TSLP-72 | 379.08 | | | | | | |
| TSLP-73 | 365.04 | | | | | | |
| TSLP-74 | 414.18 | | | | | | |
| TSLP-75 | 203.58 | | | | | | |
| TSLP-76 | 327.6 | | | | | | |
| TSLP-77 | 407.16 | | | | | | |
| TSLP-78 | 346.32 | | | | | | |
| TSLP-79 | 416.52 | | | | | | |
| TSLP-80 | 451.62 | | | | | | |
| TSLP-81 | 444.6 | | | | | | |
| TSLP-82 | 421.2 | | | | | | |
| TSLP-83 | 379.08 | | | | | | |
| TSLP-84 | 381.42 | | | | | | |
| TSLP-85 | 365.04 | | | | | | |
| TSLP-86 | 238.68 | | | | | | |
| TSLP-87 | 4.68 | | | | | | |
| TSLP-88 | 67.86 | | | | | | |
| TSLP-89 | 393.12 | | | | | | |
| TSLP-90 | 301.86 | | | | | | |
| TSLP-91 | 376.74 | | | | | | |
| TSLP-92 | 348.66 | | | | | | |
| TSLP-93 | 297.18 | | | | | | |
| TSLP-94 | 353.34 | | | | | | |
| TSLP-95 | 315.9 | | | | | | |
| TSLP-96 | 102.96 | | | | | | |
| TSLP-97 | 77.22 | | | | | | |
| TSLP-98 | 203.58 | | | | | | |
| TSLP-99 | 367.38 | | | | | | |
| TSLP-100 | 271.44 | | | | | | |
| TSLP-101 | 409.5 | | | | | | |
| TSLP-102 | 362.7 | | | | | | |
| TSLP-103 | 430.56 | | | | | | |
| TSLP-104 | 393.12 | | | | | | |
| TSLP-105 | 460.98 | | | | | | |
| TSLP-106 | 407.16 | | | | | | |
| TSLP-107 | 322.92 | | | | | | |
| TSLP-108 | 215.28 | | | | | | |
| TSLP-109 | 381.42 | | | | | | |
| TSLP-110 | 496.08 | | | | | | |
| TSLP-111 | 313.56 | | | | | | |
| TSLP-112 | 402.48 | | | | | | |
| TSLP-113 | 365.04 | | | | | | |
| TSLP-114 | 360.36 | | | | | | |
| TSLP-115 | 74.88 | | | | | | |
| TSLP-116 | 360.36 | | | | | | |
| TSLP-117 | 105.3 | | | | | | |
| TSLP-118 | 355.68 | | | | | | |
| TSLP-119 | 0 | n.b. | n.b. | n.b. | n.b. | 2396.10 | |
| TSLP-120 | 18.72 | 8.09E+05 | 1.81E−04 | 2.23E−10 | 218.7 | 21.20 | |
| TSLP-121 | 67.86 | 5.89E+05 | 1.75E−03 | 2.96E−09 | 261.6 | 37.50 | 1.35 |
| TSLP-122 | 74.88 | 4.89E+05 | 1.64E−03 | 3.36E−09 | 326.5 | 66.00 | 2.17 |
| TSLP-123 | 4.68 | | | | | | |
| TSLP-124 | 2.34 | | | | | | |
| TSLP-125 | 4.68 | | | | | | |
| TSLP-126 | 2.34 | | | | | | |
| TSLP-127 | 4.68 | | | | | | |
| TSLP-128 | 2.34 | | | | | | |
| TSLP-129 | 2.34 | | | | | | |
| TSLP-130 | 0 | | | | | | |
| TSLP-131 | 7.02 | | | | | | |
| TSLP-132 | 0 | | | | | | |
| TSLP-133 | 2.34 3 | | | | | | |
| TSLP-134 | 0 | | | | | | |
| TSLP-135 | 0 | | | | | | |
| TSLP-136 | 2.34 | | | | | | |
| TSLP-137 | 2.34 | | | | | | |
| TSLP-138 | 0 | | | | | | |
| TSLP-139 | 4.68 | | | | | | |
| TSLP-140 | 2.34 | | | | | | |
| TSLP-141 | 2.34 | | | | | | |
| TSLP-142 | 4.68 | | | | | | |
| TSLP-143 | 2.34 | | | | | | |
| TSLP-144 | 2.34 | | | | | | |
| TSLP-145 | 2.34 | | | | | | |
| TSLP-146 | 0 | | | | | | |
| TSLP-147 | 4.68 | | | | | | |
| TSLP-148 | 2.34 | | | | | | |
| TSLP-149 | 4.68 | | | | | | |
| TSLP-150 | 0 | | | | | | |
| TSLP-151 | 2.34 | | | | | | |
| TSLP-152 | 4.68 | | | | | | |
| TSLP-153 | 4.68 | | | | | | |
| TSLP-154 | 2.34 | | | | | | |
| TSLP-155 | 7.02 | | | | | | |
| TSLP-156 | 2.34 | | | | | | |
| TSLP-157 | 2.34 | | | | | | |
| TSLP-158 | 2.34 | | | | | | |
| TSLP-159 | 4.68 | | | | | | |
| TSLP-160 | 0 | | | | | | |
| TSLP-161 | 2.34 | | | | | | |
| TSLP-162 | 2.34 | | | | | | |
| TSLP-163 | 2.34 | | | | | | |
| TSLP-164 | 0 | | | | | | |
| TSLP-165 | 7.02 | | | | | | |
| TSLP-166 | 2.34 | | | | | | |
| TSLP-167 | 4.68 | | | | | | |
| TSLP-168 | 2.34 | | | | | | |
| TSLP-169 | 2.34 | | | | | | |
| TSLP-170 | 0 | | | | | | |
| TSLP-171 | 2.34 3 | | | | | | |
| TSLP-172 | 0 | | | | | | |
| TSLP-173 | 2.34 | | | | | | |
| TSLP-174 | 4.68 | | | | | | |
| TSLP-175 | 2.34 | | | | | | |
| TSLP-176 | 4.68 | | | | | | |
| TSLP-177 | 2.34 | | | | | | |
| TSLP-178 | 2.34 | | | | | | |
| TSLP-179 | 18.72 | | | | | | |
| TSLP-180 | 2.34 | | | | | | |
| TSLP-181 | 4.68 | | | | | | |
| TSLP-182 | 2.34 | | | | | | |
| TSLP-183 | 7.02 | | | | | | |
| TSLP-184 | 4.68 | | | | | | |
| TSLP-185 | 4.68 | | | | | | |
| TSLP-186 | 0 | | | | | | |
| TSLP-187 | 2.34 | | | | | | |
| TSLP-188 | 2.34 | | | | | | |
| TSLP-189 | 0 | | | | | | |
| TSLP-190 | 2.34 | | | | | | |
| TSLP-191 | 2.34 | | | | | | |
| TSLP-192 | 4.68 | | | | | | |
| TSLP-193 | 4.68 | | | | | | |
| TSLP-194 | 2.34 | | | | | | |
| TSLP-195 | 2.34 | | | | | | |
| TSLP-196 | 0 | | | | | | |
| TSLP-197 | 2.34 | | | | | | |
| TSLP-198 | 2.34 | | | | | | |
| TSLP-199 | 2.34 | | | | | | |
| TSLP-200 | 2.34 | | | | | | |
| TSLP-201 | 2.34 | | | | | | |
| TSLP-202 | 2.34 | | | | | | |
| TSLP-203 | 4.68 | | | | | | |
| TSLP-204 | 0 | | | | | | |
| TSLP-205 | 4.68 | | | | | | |
| TSLP-206 | 2.34 | | | | | | |
| TSLP-207 | 4.68 | | | | | | |
| TSLP-208 | 0 | | | | | | |
| TSLP-209 | 4.68 | | | | | | |
| TSLP-210 | 0 | | | | | | |
| TSLP-211 | 7.02 | | | | | | |
| TSLP-212 | 4.68 | | | | | | |
| TSLP-213 | 4.68 | | | | | | |
| TSLP-214 | 4.68 | | | | | | |
| TSLP-215 | 14.04 | n.b. | n.b. | n.b. | n.b. | 3.70 | |
| TSLP-216 | 4.68 | | | | | | |
| TSLP-217 | 7.02 | | | | | | |
| TSLP-218 | 7.02 | | | | | | |
| TSLP-219 | 7.02 | | | | | | |
| TSLP-220 | 7.02 | | | | | | |
| TSLP-221 | 11.7 | | | | | | |
| TSLP-222 | 2.34 | | | | | | |
| TSLP-223 | 2.34 | | | | | | |
| TSLP-224 | 4.68 | | | | | | |
| TSLP-225 | 4.68 | | | | | | |
| TSLP-226 | 0 | | | | | | |
| TSLP-227 | 7.02 | | | | | | |
| TSLP-228 | 49.14 | | | | | | |
| TSLP-229 | 7.02 | | | | | | |
| TSLP-230 | 7.02 | | | | | | |
| TSLP-231 | 7.02 | | | | | | |
| TSLP-232 | 9.36 | | | | | | |
| TSLP-233 | 7.02 | | | | | | |
| TSLP-234 | 2.34 | | | | | | |
| TSLP-235 | 2.34 | | | | | | |
| TSLP-236 | 4.68 | | | | | | |
| TSLP-237 | 2.34 | | | | | | |
| TSLP-238 | 0 | | | | | | |
| TSLP-239 | 7.02 | | | | | | |
| TSLP-240 | 7.02 | | | | | | |
| TSLP-241 | 7.02 | | | | | | |
| TSLP-242 | 7.02 | | | | | | |
| TSLP-243 | 16.38 | | | | | | |
| TSLP-244 | 4.68 | | | | | | |
| TSLP-245 | 11.7 | | | | | | |
| TSLP-246 | 0 | | | | | | |
| TSLP-247 | 7.02 | | | | | | |
| TSLP-248 | 2.34 | | | | | | |
| TSLP-249 | 0 | | | | | | |
| TSLP-250 | 4.68 | | | | | | |
| TSLP-251 | 0 | | | | | | |
| TSLP-252 | 7.02 | | | | | | |
| TSLP-253 | 7.02 | | | | | | |
| TSLP-254 | 7.02 | | | | | | |
| TSLP-255 | 7.02 | | | | | | |
| TSLP-256 | 7.02 | | | | | | |
| TSLP-257 | 11.7 | | | | | | |
| TSLP-258 | 4.68 | | | | | | |
| TSLP-259 | 4.68 | | | | | | |
| TSLP-260 | 0 | | | | | | |
| TSLP-261 | 7.02 | | | | | | |
| TSLP-262 | 4.68 | | | | | | |
| TSLP-263 | 9.36 | | | | | | |
| TSLP-264 | 7.02 | | | | | | |
| TSLP-265 | 7.02 | | | | | | |
| TSLP-266 | 7.02 | | | | | | |
| TSLP-267 | 7.02 | | | | | | |
| TSLP-268 | 11.7 | | | | | | |
| TSLP-269 | 4.68 | | | | | | |
| TSLP-270 | 7.02 | | | | | | |
| TSLP-271 | 11.7 | | | | | | |
| TSLP-272 | 35.1 | | | | | | |
| TSLP-273 | 18.72 | | | | | | |
| TSLP-274 | 0 | | | | | | |
| TSLP-275 | 2.34 | | | | | | |
| TSLP-276 | 14.04 | | | | | | |
| TSLP-277 | 11.7 | | | | | | |
| TSLP-278 | 9.36 | | | | | | |
| TSLP-279 | 37.44 | | | | | | |
| TSLP-280 | 14.04 | | | | | | |
| TSLP-281 | 11.7 | | | | | | |
| TSLP-282 | 2.34 | | | | | | |
| TSLP-283 | 2.34 | | | | | | |
| TSLP-284 | 2.34 | | | | | | |
| TSLP-285 | 16.38 | | | | | | |
| TSLP-286 | 16.38 | | | | | | |
| TSLP-287 | 4.68 | | | | | | |
| TSLP-288 | 18.72 | | | | | | |
| TSLP-289 | 4.68 | | | | | | |
| TSLP-290 | 7.02 | | | | | | |
| TSLP-291 | 7.02 | | | | | | |
| TSLP-292 | 7.02 | | | | | | |
| TSLP-293 | 7.02 | | | | | | |
| TSLP-294 | 4.68 | | | | | | |
| TSLP-295 | 11.7 | | | | | | |
| TSLP-296 | 11.7 | | | | | | |
| TSLP-297 | 4.68 | | | | | | |
| TSLP-298 | 2.34 | | | | | | |
| TSLP-299 | 0 | | | | | | |
| TSLP-300 | 9.36 | | | | | | |
| TSLP-301 | 7.02 | | | | | | |

TABLE 5
Data for IL1RL1

| | | | | | | 100 nM | |
|---|---|---|---|---|---|---|---|
| | | | | | | FACS | EC50 |
| IL1RL1 | | kon (M-1 | | | Rmax | (MFI | FACS |
| Variant | yield | s-1) | koff (s-1) | KD (M) | (RU) | Ratio) | (nM) |
| IL1RL1-1 | 414.18 | 1.72E+05 | 1.01E−04 | 5.84E−10 | 1204.1 | 660.24 | |
| IL1RL1-2 | 409.5 | 1.18E+05 | 3.11E−05 | 2.65E−10 | 447.3 | 276.86 | |
| IL1RL1-3 | 301.86 | 1.91E+05 | 1.00E−05 | 5.24E−11 | 719.1 | 491.78 | |
| IL1RL1-4 | 374.4 | 1.74E+05 | 1.00E−05 | 5.74E−11 | 467.0 | 472.19 | |
| IL1RL1-5 | 327.6 | 1.91E+05 | 1.62E−04 | 8.46E−10 | 671.8 | 507.67 | |
| IL1RL1-6 | 458.64 | 2.48E+05 | 3.70E−05 | 1.49E−10 | 525.2 | 127.81 | |
| IL1RL1-7 | 353.34 | 1.32E+05 | 1.00E−05 | 7.57E−11 | 803.5 | 585.65 | |
| IL1RL1-8 | 393.12 | 6.03E+04 | 1.00E−05 | 1.66E−10 | 630.8 | 298.44 | |
| IL1RL1-9 | 2.34 | n.b. | n.b. | n.b. | n.b. | | |
| IL1RL1-10 | 386.1 | 1.19E+05 | 2.41E−04 | 2.02E−09 | 288.9 | 398.33 | |
| IL1RL1-11 | 189.54 | 5.28E+04 | 6.81E−04 | 1.29E−08 | 379.7 | 446.42 | |
| IL1RL1-12 | 325.26 | 8.01E+04 | 3.26E−04 | 4.08E−09 | 468.2 | 437.39 | |
| IL1RL1-13 | 0 | n.b. | n.b. | n.b. | n.b. | | |
| IL1RL1-14 | 208.26 | 1.34E+05 | 1.00E−05 | 7.44E−11 | 495.9 | 514.66 | |
| IL1RL1-15 | 60.84 | 1.27E+05 | 4.10E−04 | 3.23E−09 | 186.7 | 331.12 | |
| IL1RL1-16 | 271.44 | 1.93E+05 | 1.10E−03 | 5.71E−09 | 560.7 | 478.11 | |
| IL1RL1-17 | 285.48 | 2.13E+05 | 5.88E−04 | 2.76E−09 | 665.2 | 415.04 | |
| IL1RL1-18 | 362.7 | 1.26E+05 | 3.95E−05 | 3.12E−10 | 1081.9 | 277.48 | |
| IL1RL1-19 | 395.46 | 1.23E+05 | 1.29E−05 | 1.04E−10 | 810.4 | 486.25 | |
| IL1RL1-20 | 362.7 | 9.66E+04 | 2.92E−05 | 3.02E−10 | 875.7 | 396.39 | |
| IL1RL1-21 | 374.4 | 1.23E+05 | 5.04E−05 | 4.09E−10 | 777.9 | 520.59 | |
| IL1RL1-22 | 325.26 | 1.79E+05 | 2.43E−04 | 1.36E−09 | 130.3 | 294.23 | |
| IL1RL1-23 | 212.94 | 5.31E+04 | 1.00E−05 | 1.88E−10 | 60.0 | 525.75 | |
| IL1RL1-24 | 308.88 | 1.43E+05 | 2.32E−04 | 1.62E−09 | 48.3 | 438.39 | |
| IL1RL1-25 | 430.56 | 2.67E+05 | 3.92E−04 | 1.47E−09 | 733.2 | 69.51 | |
| IL1RL1-26 | 482.04 | 1.98E+05 | 6.18E−04 | 3.12E−09 | 826.5 | 309.82 | |
| IL1RL1-27 | 332.28 | 1.01E+05 | 3.72E−04 | 3.70E−09 | 755.9 | 450.48 | |
| IL1RL1-28 | 393.12 | | | | | 472.94 | |
| IL1RL1-29 | 226.98 | | | | | 430.52 | |
| IL1RL1-30 | 353.34 | | | | | 514.66 | |
| IL1RL1-31 | 388.44 | | | | | 311.14 | |
| IL1RL1-32 | 294.84 | | | | | 432.15 | |
| IL1RL1-33 | 477.36 | | | | | 504.21 | |
| IL1RL1-34 | 397.8 | | | | | 476.46 | |
| IL1RL1-35 | 409.5 | | | | | 513.64 | |
| IL1RL1-36 | 18.72 | n.b. | n.b. | n.b. | n.b. | 87.74 | |
| IL1RL1-37 | 32.76 | n.b. | n.b. | n.b. | n.b. | 1.25 | |
| IL1RL1-38 | 25.74 | | | | | 1.37 | |
| IL1RL1-39 | 215.28 | 8.00E+04 | 5.50E−05 | 6.88E−10 | 403.4 | 266.78 | |
| IL1RL1-40 | 238.68 | 1.59E+05 | 1.16E−03 | 7.31E−09 | 372.3 | 414.78 | |
| IL1RL1-41 | 46.8 | n.b. | n.b. | n.b. | n.b. | 0.55 | |
| IL1RL1-42 | 49.14 | n.b. | n.b. | n.b. | n.b. | 0.86 | |
| IL1RL1-43 | 63.18 | n.b. | n.b. | n.b. | n.b. | 1.25 | |
| IL1RL1-44 | 308.88 | 6.26E+05 | 1.00E−05 | 1.60E−11 | 381.2 | 448.45 | |
| IL1RL1-45 | 259.74 | 2.75E+05 | 3.26E−04 | 1.19E−09 | 910.2 | 704.09 | |
| IL1RL1-46 | 241.02 | 1.81E+05 | 5.53E−04 | 3.06E−09 | 414.6 | 299.80 | |
| IL1RL1-47 | 163.8 | 6.56E+04 | 3.10E−04 | 4.73E−09 | 349.6 | 467.27 | |
| IL1RL1-48 | 21.06 | n.b. | n.b. | n.b. | n.b. | 1.06 | |
| IL1RL1-49 | 205.92 | 2.77E+05 | 6.73E−04 | 2.42E−09 | 964.3 | 248.36 | |
| IL1RL1-50 | 7.02 | n.b. | n.b. | n.b. | n.b. | | |
| IL1RL1-51 | 39.78 | n.b. | n.b. | n.b. | n.b. | 1.28 | |
| IL1RL1-52 | 194.22 | 2.88E+05 | 3.48E−05 | 1.21E−10 | 905.9 | 224.57 | |
| IL1RL1-53 | 262.08 | 2.89E+05 | 2.67E−04 | 9.27E−10 | 658.1 | 440.57 | |
| IL1RL1-54 | 290.16 | 1.76E+05 | 9.06E−05 | 5.16E−10 | 767.6 | 499.65 | |
| IL1RL1-55 | 25.74 | | | | | 1.60 | |
| IL1RL1-56 | 175.5 | | | | | | |
| IL1RL1-57 | 121.68 | 2.11E+05 | 3.64E−04 | 1.73E−09 | 542.3 | 282.36 | |
| IL1RL1-58 | 365.04 | | | | | | |
| IL1RL1-59 | 222.3 | 1.34E+05 | 1.00E−05 | 7.48E−11 | 352.5 | 373.97 | |
| IL1RL1-60 | 276.12 | | | | | | |
| IL1RL1-61 | 343.98 | | | | | | |
| IL1RL1-62 | 299.52 | | | | | | |
| IL1RL1-63 | 243.36 | 2.07E+05 | 3.16E−05 | 1.53E−10 | 1036.6 | 450.83 | |
| IL1RL1-64 | 271.44 | | | | | | |
| IL1RL1-65 | 189.54 | | | | | | |
| IL1RL1-66 | 168.48 | | | | | | |
| IL1RL1-67 | 58.5 | | | | | | |
| IL1RL1-68 | 210.6 | | | | | | |
| IL1RL1-69 | 67.86 | | | | | | |
| IL1RL1-70 | 117 | | | | | | |
| IL1RL1-71 | 306.54 | | | | | | |
| IL1RL1-72 | 327.6 | | | | | | |
| IL1RL1-73 | 219.96 | 1.76E+05 | 3.62E−04 | 2.06E−09 | 1195.5 | 462.75 | |
| IL1RL1-74 | 147.42 | 1.98E+05 | 1.00E−05 | 5.05E−11 | 857.1 | 520.59 | |
| IL1RL1-75 | 4.68 | | | | | | |
| IL1RL1-76 | 11.7 | n.b. | n.b. | n.b. | n.b. | 384.51 | |
| IL1RL1-77 | 18.72 | n.b. | n.b. | n.b. | n.b. | 1.12 | |
| IL1RL1-78 | 372.06 | 2.04E+05 | 2.78E−04 | 1.36E−09 | 918.0 | 475.39 | |
| IL1RL1-79 | 14.04 | | | | | 1.00 | |
| IL1RL1-80 | 14.04 | | | | | 1.49 | |
| IL1RL1-81 | 280.8 | 1.59E+05 | 4.51E−05 | 2.85E−10 | 1061.6 | 217.38 | |
| IL1RL1-82 | 297.18 | 7.84E+04 | 1.00E−05 | 1.28E−10 | 691.8 | 344.36 | |
| IL1RL1-83 | 325.26 | 1.34E+05 | 1.60E−04 | 1.20E−09 | 1192.0 | 627.73 | |
| IL1RL1-84 | 212.94 | 1.49E+05 | 1.00E−05 | 6.73E−11 | 532.3 | | |
| IL1RL1-85 | 14.04 | n.b. | n.b. | n.b. | n.b. | 4.47 | |
| IL1RL1-86 | 231.66 | 1.31E+05 | 1.00E−05 | 7.62E−11 | 867.7 | 204.26 | |
| IL1RL1-87 | 11.7 | | | | | 2.37 | |
| IL1RL1-88 | 250.38 | 1.97E+05 | 1.04E−04 | 5.29E−10 | 804.3 | 338.64 | |
| IL1RL1-89 | 39.78 | 4.96E+05 | 3.88E−04 | 7.81E−10 | 164.3 | 340.40 | |
| IL1RL1-90 | 306.54 | 1.28E+05 | 1.00E−05 | 7.80E−11 | 589.3 | 105.24 | |
| IL1RL1-91 | 320.58 | 1.41E+05 | 2.61E−04 | 1.85E−09 | 962.9 | 475.39 | |
| IL1RL1-92 | 278.46 | 1.41E+05 | 6.19E−04 | 4.40E−09 | 931.1 | 483.64 | |
| IL1RL1-93 | 44.46 | | | | | | |
| IL1RL1-94 | 46.8 | | | | | | |
| IL1RL1-95 | 257.4 | | | | | | |
| IL1RL1-96 | 49.14 | | | | | | |
| IL1RL1-97 | 72.54 | | | | | | |
| IL1RL1-98 | 147.42 | | | | | | |
| IL1RL1-99 | 131.04 | | | | | | |
| IL1RL1-100 | 30.42 | | | | | | |
| IL1RL1-101 | 51.48 | | | | | | |
| IL1RL1-102 | 51.48 | | | | | | |
| IL1RL1-103 | 32.76 | | | | | | |
| IL1RL1-104 | 18.72 | | | | | | |
| IL1RL1-105 | 93.6 | | | | | | |
| IL1RL1-106 | 46.8 | | | | | | |
| IL1RL1-107 | 65.52 | | | | | | |
| IL1RL1-108 | 107.64 | | | | | | |
| IL1RL1-109 | 30.42 | | | | | | |
| IL1RL1-110 | 39.78 | | | | | | |
| IL1RL1-111 | | | | | | | |
| IL1RL1-112 | 7.02 | | | | | | |
| IL1RL1-113 | 98.28 | | | | | | |
| IL1RL1-114 | 16.38 | | | | | | |
| IL1RL1-115 | 16.38 | | | | | | |
| IL1RL1-116 | 4.68 | | | | | | |
| IL1RL1-117 | 145.08 | | | | | | |
| IL1RL1-118 | 100.62 | | | | | | |
| IL1RL1-119 | 25.74 | | | | | | |
| IL1RL1-120 | 168.48 | | | | | | |
| IL1RL1-121 | 184.86 | | | | | | |
| IL1RL1-122 | 189.54 | | | | | | |
| IL1RL1-123 | 30.42 | | | | | | |
| IL1RL1-124 | 2.34 | | | | | | |
| IL1RL1-125 | 187.2 | | | | | | |
| IL1RL1-126 | 35.1 | | | | | | |
| IL1RL1-127 | 84.24 | | | | | | |
| IL1RL1-128 | 9.36 | | | | | | |
| IL1RL1-129 | 21.06 | | | | | | |
| IL1RL1-130 | 28.08 | | | | | | |
| IL1RL1-131 | 28.08 | | | | | | |
| IL1RL1-132 | 28.08 | | | | | | |
| IL1RL1-133 | 2.34 | | | | | | |
| IL1RL1-134 | 25.74 | | | | | | |
| IL1RL1-135 | 9.36 | | | | | | |
| IL1RL1-136 | 28.08 | | | | | | |
| IL1RL1-137 | 14.04 | | | | | | |
| IL1RL1-138 | 4.68 | | | | | | |
| IL1RL1-139 | 161.46 | | | | | | |
| IL1RL1-140 | 91.26 | | | | | | |
| IL1RL1-141 | 28.08 | | | | | | |
| IL1RL1-142 | 4.68 | | | | | | |
| IL1RL1-143 | 32.76 | | | | | | |
| IL1RL1-144 | 9.36 | | | | | | |
| IL1RL1-145 | 91.26 | | | | | | |
| IL1RL1-146 | 42.12 | | | | | | |
| IL1RL1-147 | 65.52 | | | | | | |
| IL1RL1-148 | 191.88 | | | | | | |
| IL1RL1-149 | 18.72 | | | | | | |
| IL1RL1-150 | 16.38 | | | | | | |
| IL1RL1-151 | 304.2 | | | | | | |
| IL1RL1-152 | 163.8 | | | | | | |
| IL1RL1-153 | 278.46 | | | | | | |
| IL1RL1-154 | 14.04 | | | | | | |
| IL1RL1-155 | 156.78 | | | | | | |
| IL1RL1-156 | 4.68 | | | | | | |
| IL1RL1-157 | 42.12 | | | | | | |
| IL1RL1-158 | 18.72 | | | | | | |
| IL1RL1-159 | 14.04 | | | | | | |
| IL1RL1-160 | 93.6 | | | | | | |
| IL1RL1-161 | 44.46 | | | | | | |
| IL1RL1-162 | 4.68 | | | | | | |
| IL1RL1-163 | 252.72 | | | | | | |
| IL1RL1-164 | | | | | | | |
| IL1RL1-165 | 180.18 | | | | | | |
| IL1RL1-166 | 11.7 | | | | | | |
| IL1RL1-167 | 25.74 | | | | | | |
| IL1RL1-168 | 63.18 | | | | | | |
| IL1RL1-169 | 16.38 | | | | | | |
| IL1RL1-170 | 72.54 | | | | | | |
| IL1RL1-171 | 369.72 | | | | | | |
| IL1RL1-172 | | | | | | | |
| IL1RL1-173 | 30.42 | | | | | | |
| IL1RL1-174 | 271.44 | | | | | | |
| IL1RL1-175 | 273.78 | | | | | | |
| IL1RL1-176 | 18.72 | | | | | | |
| IL1RL1-177 | 23.4 | | | | | | |
| IL1RL1-178 | 35.1 | | | | | | |
| IL1RL1-179 | 32.76 | | | | | | |
| IL1RL1-180 | 372.06 | | | | | | |
| IL1RL1-181 | 121.68 | | | | | | |
| IL1RL1-182 | 248.04 | | | | | | |
| IL1RL1-183 | 332.28 | | | | | | |
| IL1RL1-184 | 201.24 | | | | | | |
| IL1RL1-185 | 215.28 | | | | | | |
| IL1RL1-186 | 11.7 | | | | | | |
| IL1RL1-187 | 203.58 | | | | | | |
| IL1RL1-188 | 196.56 | | | | | | |
| IL1RL1-189 | 23.4 | | | | | 7.46 | |
| IL1RL1-190 | 4.68 | | | | | | |
| IL1RL1-191 | 7.02 | | | | | | |
| IL1RL1-192 | 25.74 | | | | | 0.55 | |
| IL1RL1-193 | 21.06 | | | | | 1.62 | |
| IL1RL1-194 | 63.18 | | | | | 2.20 | |
| IL1RL1-195 | 7.02 | | | | | | |
| IL1RL1-196 | 21.06 | | | | | | |
| IL1RL1-197 | 28.08 | | | | | 2.52 | |
| IL1RL1-198 | 0 | | | | | | |
| IL1RL1-199 | 4.68 | | | | | | |
| IL1RL1-200 | 11.7 | | | | | 1.00 | |
| IL1RL1-201 | 9.36 | | | | | | |
| IL1RL1-202 | 21.06 | | | | | | |
| IL1RL1-203 | 35.1 | | | | | | |
| IL1RL1-204 | 14.04 | | | | | | |
| IL1RL1-205 | 11.7 | | | | | | |
| IL1RL1-206 | 7.02 | | | | | | |
| IL1RL1-207 | 11.7 | | | | | | |
| IL1RL1-208 | 18.72 | | | | | | |
| IL1RL1-209 | | | | | | | |
| IL1RL1-210 | | | | | | | |
| IL1RL1-211 | 0 | | | | | | |
| IL1RL1-212 | 4.68 | | | | | | |
| IL1RL1-213 | 9.36 | | | | | | |
| IL1RL1-214 | 39.78 | | | | | 1.34 | |
| IL1RL1-215 | 2.34 | | | | | | |
| IL1RL1-216 | 4.68 | | | | | | |
| IL1RL1-217 | | | | | | | |
| IL1RL1-218 | | | | | | | |
| IL1RL1-219 | 9.36 | | | | | | |
| IL1RL1-220 | 11.7 | | | | | 2.86 | |
| IL1RL1-221 | 14.04 | | | | | 0.51 | |
| IL1RL1-222 | 4.68 | | | | | | |
| IL1RL1-223 | 7.02 | | | | | | |
| IL1RL1-224 | 11.7 | | | | | | |
| IL1RL1-225 | 23.4 | | | | | | |
| IL1RL1-226 | 11.7 | | | | | | |
| IL1RL1-227 | 14.04 | | | | | | |
| IL1RL1-228 | 14.04 | | | | | | |
| IL1RL1-229 | 14.04 | | | | | | |
| IL1RL1-230 | 18.72 | | | | | 1.43 | |
| IL1RL1-231 | 9.36 | | | | | | |
| IL1RL1-232 | 9.36 | | | | | | |
| IL1RL1-233 | 7.02 | | | | | | |
| IL1RL1-234 | 2.34 | | | | | | |
| IL1RL1-235 | 4.68 | | | | | | |
| IL1RL1-236 | 7.02 | | | | | | |
| IL1RL1-237 | 9.36 | | | | | | |
| IL1RL1-238 | 7.02 | | | | | | |
| IL1RL1-239 | 14.04 | | | | | 1.93 | |
| IL1RL1-240 | 4.68 | | | | | | |
| IL1RL1-241 | 9.36 | | | | | | |
| IL1RL1-242 | 11.7 | | | | | | |
| IL1RL1-243 | 7.02 | | | | | | |
| IL1RL1-244 | 4.68 | | | | | | |
| IL1RL1-245 | 11.7 | | | | | 1.28 | |
| IL1RL1-246 | 4.68 | | | | | | |
| IL1RL1-247 | 4.68 | | | | | | |
| IL1RL1-248 | 4.68 | | | | | | |
| IL1RL1-249 | 4.68 | | | | | | |
| IL1RL1-250 | 25.74 | | | | | | |
| IL1RL1-251 | 0 | | | | | | |
| IL1RL1-252 | 51.48 | | | | | 0.58 | |
| IL1RL1-253 | 25.74 | | | | | | |
| IL1RL1-254 | 9.36 | | | | | | |
| IL1RL1-255 | 9.36 | | | | | | |
| IL1RL1-256 | 21.06 | | | | | 0.60 | |
| IL1RL1-257 | 14.04 | | | | | 1.38 | |
| IL1RL1-258 | 9.36 | | | | | | |
| IL1RL1-259 | 7.02 | | | | | | |
| IL1RL1-260 | 18.72 | | | | | | |
| IL1RL1-261 | 11.7 | | | | | | |
| IL1RL1-262 | 28.08 | | | | | 6.04 | |
| IL1RL1-263 | 0 | | | | | | |
| IL1RL1-264 | | | | | | | |
| IL1RL1-265 | 11.7 | | | | | | |
| IL1RL1-266 | 2.34 | | | | | | |
| IL1RL1-267 | 18.72 | | | | | 2.86 | |
| IL1RL1-268 | 11.7 | | | | | | |
| IL1RL1-269 | 14.04 | | | | | 0.85 | |
| IL1RL1-270 | 46.8 | | | | | 0.31 | |
| IL1RL1-271 | 4.68 | | | | | | |
| IL1RL1-272 | 9.36 | | | | | | |
| IL1RL1-273 | 4.68 | | | | | | |
| IL1RL1-274 | 9.36 | | | | | | |
| IL1RL1-275 | 4.68 | | | | | | |
| IL1RL1-276 | 39.78 | | | | | | |
| IL1RL1-277 | 21.06 | | | | | | |
| IL1RL1-278 | 30.42 | | | | | | |
| IL1RL1-279 | 14.04 | | | | | | |
| IL1RL1-280 | 23.4 | | | | | | |
| IL1RL1-281 | 14.04 | | | | | | |
| IL1RL1-282 | 16.38 | | | | | | |
| IL1RL1-283 | 14.04 | | | | | | |
| IL1RL1-284 | 30.42 | | | | | | |
| IL1RL1-285 | 11.7 | | | | | | |
| IL1RL1-286 | 28.08 | | | | | | |
| IL1RL1-287 | 9.36 | | | | | | |
| IL1RL1-288 | 9.36 | | | | | | |
| IL1RL1-289 | 9.36 | | | | | | |
| IL1RL1-290 | 9.36 | | | | | | |
| IL1RL1-291 | 11.7 | | | | | | |
| IL1RL1-292 | 11.7 | | | | | | |
| IL1RL1-293 | 9.36 | | | | | | |
| IL1RL1-294 | 18.72 | | | | | | |
| IL1RL1-295 | 18.72 | | | | | | |
| IL1RL1-296 | 11.7 | | | | | | |
| IL1RL1-297 | 49.14 | | | | | | |
| IL1RL1-298 | 9.36 | | | | | | |
| IL1RL1-299 | 11.7 | | | | | | |
| IL1RL1-300 | 16.38 | | | | | | |
| IL1RL1-301 | 11.7 | | | | | | |
| IL1RL1-302 | 11.7 | | | | | | |
| IL1RL1-303 | 9.36 | | | | | | |
| IL1RL1-304 | 9.36 | | | | | | |
| IL1RL1-305 | 9.36 | | | | | | |
| IL1RL1-306 | 9.36 | | | | | | |
| IL1RL1-307 | 14.04 | | | | | | |
| IL1RL1-308 | 39.78 | | | | | | |
| IL1RL1-309 | 9.36 | | | | | | |
| IL1RL1-310 | 11.7 | | | | | | |
| IL1RL1-311 | | | | | | | |
| IL1RL1-312 | 9.36 | | | | | | |
| IL1RL1-313 | 14.04 | | | | | | |
| IL1RL1-314 | | | | | | | |
| IL1RL1-315 | 9.36 | | | | | | |
| IL1RL1-316 | 9.36 | | | | | | |
| IL1RL1-317 | | | | | | | |
| IL1RL1-318 | 23.4 | | | | | | |
| IL1RL1-319 | 9.36 | | | | | | |
| IL1RL1-320 | 9.36 | | | | | | |
| IL1RL1-321 | | | | | | | |
| IL1RL1-322 | 21.06 | | | | | | |
| IL1RL1-323 | 11.7 | | | | | | |
| IL1RL1-324 | 9.36 | | | | | | |
| IL1RL1-325 | 9.36 | | | | | | |
| IL1RL1-326 | 9.36 | | | | | | |
| IL1RL1-327 | 11.7 | | | | | | |
| IL1RL1-328 | | | | | | | |
| IL1RL1-329 | 9.36 | | | | | | |
| IL1RL1-330 | 9.36 | | | | | | |
| IL1RL1-331 | 9.36 | | | | | | |
| IL1RL1-332 | 28.08 | | | | | | |
| IL1RL1-333 | 9.36 | | | | | | |
| IL1RL1-334 | 9.36 | | | | | | |
| IL1RL1-335 | 16.38 | | | | | | |
| IL1RL1-336 | 7.02 | | | | | | |
| IL1RL1-337 | 14.04 | | | | | | |
| IL1RL1-338 | 11.7 | | | | | | |
| IL1RL1-339 | 9.36 | | | | | | |
| IL1RL1-340 | 7.02 | | | | | | |
| IL1RL1-341 | 9.36 | | | | | | |
| IL1RL1-342 | 18.72 | | | | | | |
| IL1RL1-343 | 9.36 | | | | | | |
| IL1RL1-344 | 9.36 | | | | | | |
| IL1RL1-345 | 9.36 | | | | | | |
| IL1RL1-346 | 11.7 | | | | | | |
| IL1RL1-347 | 16.38 | | | | | | |
| IL1RL1-348 | 9.36 | | | | | | |
| IL1RL1-349 | 9.36 | | | | | | |
| IL1RL1-350 | 11.7 | | | | | | |
| IL1RL1-351 | 11.7 | | | | | | |
| IL1RL1-352 | 9.36 | | | | | | |
| IL1RL1-353 | 9.36 | | | | | | |
| IL1RL1-354 | 11.7 | | | | | | |
| IL1RL1-355 | 9.36 | | | | | | |
| IL1RL1-356 | 11.7 | | | | | | |
| IL1RL1-357 | 18.72 | | | | | | |
| IL1RL1-358 | 9.36 | | | | | | |
| IL1RL1-359 | 9.36 | | | | | | |
| IL1RL1-360 | 11.7 | | | | | | |
| IL1RL1-361 | 9.36 | | | | | | |
| IL1RL1-362 | 11.7 | | | | | | |
| IL1RL1-363 | 14.04 | | | | | | |
| IL1RL1-364 | 9.36 | | | | | | |
| IL1RL1-365 | 9.36 | | | | | | |
| IL1RL1-366 | 9.36 | | | | | | |
| IL1RL1-367 | 9.36 | | | | | | |
| IL1RL1-368 | 14.04 | | | | | | |
| IL1RL1-369 | 11.7 | | | | | | |
| IL1RL1-370 | 14.04 | | | | | | |
| IL1RL1-371 | 9.36 | | | | | | |
| IL1RL1-372 | 9.36 | | | | | | |
| IL1RL1-373 | 9.36 | | | | | | |
| IL1RL1-374 | 4.68 | | | | | | |
| IL1RL1-375 | 18.72 | | | | | 11.32 | |
| IL1RL1-376 | 9.36 | | | | | | |
| IL1RL1-377 | 35.1 | | | | | 1.21 | |
| IL1RL1-378 | 7.02 | | | | | | |
| IL1RL1-379 | 121.68 | | | | | | |
| IL1RL1-380 | 49.14 | | | | | 0.60 | |
| IL1RL1-381 | 28.08 | | | | | 0.85 | |
| IL1RL1-382 | 11.7 | | | | | | |
| IL1RL1-383 | 37.44 | | | | | | |
| IL1RL1-384 | 25.74 | | | | | | |
| IL1RL1-385 | 191.88 | | | | | 7.61 | |
| IL1RL1-386 | 32.76 | | | | | | |
| IL1RL1-387 | 25.74 | | | | | 1.06 | |
| IL1RL1-388 | 32.76 | | | | | 0.73 | |
| IL1RL1-389 | 14.04 | | | | | | |
| IL1RL1-390 | 23.4 | | | | | | |
| IL1RL1-391 | 11.7 | | | | | | |
| IL1RL1-392 | 2.34 | | | | | | |
| IL1RL1-393 | 16.38 | | | | | 2.28 | |
| IL1RL1-394 | 11.7 | | | | | | |
| IL1RL1-395 | 9.36 | | | | | | |
| IL1RL1-396 | 11.7 | | | | | | |
| IL1RL1-397 | 7.02 | | | | | | |
| IL1RL1-398 | 142.74 | | | | | | |
| IL1RL1-399 | 23.4 | | | | | | |
| IL1RL1-400 | 107.64 | | | | | | |
| IL1RL1-401 | 25.74 | | | | | | |
| IL1RL1-402 | 28.08 | | | | | | |
| IL1RL1-403 | 23.4 | | | | | | |
| IL1RL1-404 | 88.92 | | | | | | |
| IL1RL1-405 | 28.08 | | | | | | |
| IL1RL1-406 | 9.36 | | | | | | |
| IL1RL1-407 | 14.04 | | | | | | |
| IL1RL1-408 | 11.7 | | | | | | |
| IL1RL1-409 | 16.38 | | | | | | |
| IL1RL1-410 | 7.02 | | | | | | |
| IL1RL1-411 | 2.34 | | | | | | |
| IL1RL1-412 | 16.38 | | | | | | |
| IL1RL1-413 | 14.04 | | | | | | |
| IL1RL1-414 | 25.74 | | | | | | |
| IL1RL1-415 | 7.02 | | | | | | |
| IL1RL1-416 | 11.7 | | | | | | |
| IL1RL1-417 | 21.06 | | | | | | |
| IL1RL1-418 | 44.46 | | | | | | |
| IL1RL1-419 | 4.68 | | | | | | |
| IL1RL1-420 | 21.06 | | | | | | |
| IL1RL1-421 | 4.68 | | | | | | |
| IL1RL1-422 | 18.72 | | | | | | |
| IL1RL1-423 | | | | | | | |
| IL1RL1-424 | 9.36 | | | | | | |
| IL1RL1-425 | 18.72 | | | | | | |
| IL1RL1-426 | 21.06 | | | | | | |
| IL1RL1-427 | 37.44 | | | | | | |
| IL1RL1-428 | 9.36 | | | | | | |
| IL1RL1-429 | 14.04 | | | | | | |
| IL1RL1-430 | 112.32 | | | | | | |
| IL1RL1-431 | | | | | | | |
| IL1RL1-432 | 9.36 | | | | | | |
| IL1RL1-433 | 56.16 | | | | | | |
| IL1RL1-434 | 11.7 | | | | | | |
| IL1RL1-435 | 4.68 | | | | | | |
| IL1RL1-436 | 7.02 | | | | | | |
| IL1RL1-437 | 7.02 | | | | | | |
| IL1RL1-438 | 18.72 | | | | | | |
| IL1RL1-439 | 9.36 | | | | | | |
| IL1RL1-440 | 56.16 | | | | | | |
| IL1RL1-441 | 119.34 | | | | | | |
| IL1RL1-442 | 9.36 | | | | | | |
| IL1RL1-443 | 2.34 | | | | | | |
| IL1RL1-444 | 23.4 | | | | | | |
| IL1RL1-445 | 9.36 | | | | | | |
| IL1RL1-446 | 11.7 | | | | | | |
| IL1RL1-447 | 18.72 | | | | | | |
| IL1RL1-448 | 21.06 | | | | | | |
| IL1RL1-449 | 16.38 | | | | | | |
| IL1RL1-450 | 21.06 | | | | | | |
| IL1RL1-451 | 4.68 | | | | | | |
| IL1RL1-452 | 23.4 | | | | | | |
| IL1RL1-453 | 11.7 | | | | | | |
| IL1RL1-454 | 18.72 | | | | | | |
| IL1RL1-455 | 16.38 | | | | | | |
| IL1RL1-456 | 7.02 | | | | | | |
| IL1RL1-457 | 7.02 | | | | | | |
| IL1RL1-458 | 65.52 | | | | | | |
| IL1RL1-459 | 30.42 | | | | | | |
| IL1RL1-460 | 9.36 | | | | | | |
| IL1RL1-461 | 16.38 | | | | | | |
| IL1RL1-462 | 25.74 | | | | | | |
| IL1RL1-463 | 16.38 | | | | | | |
| IL1RL1-464 | 9.36 | | | | | | |
| IL1RL1-465 | 14.04 | | | | | | |
| IL1RL1-466 | 21.06 | | | | | | |
| IL1RL1-467 | 124.02 | | | | | | |
| IL1RL1-468 | 11.7 | | | | | | |
| IL1RL1-469 | 9.36 | | | | | | |
| IL1RL1-470 | 39.78 | | | | | | |
| IL1RL1-471 | 53.82 | | | | | | |
| IL1RL1-472 | 9.36 | | | | | | |
| IL1RL1-473 | 42.12 | | | | | | |
| IL1RL1-474 | 30.42 | | | | | | |
| IL1RL1-475 | 189.54 | | | | | | |
| IL1RL1-476 | 18.72 | | | | | | |
| IL1RL1-477 | 9.36 | | | | | | |
| IL1RL1-478 | 14.04 | | | | | | |
| IL1RL1-479 | 39.78 | | | | | | |
| IL1RL1-480 | 30.42 | | | | | | |
| IL1RL1-481 | 14.04 | | | | | | |
| IL1RL1-482 | 21.06 | | | | | | |
| IL1RL1-483 | 9.36 | | | | | | |
| IL1RL1-484 | 7.02 | | | | | | |
| IL1RL1-485 | 28.08 | | | | | | |
| IL1RL1-486 | 30.42 | | | | | | |
| IL1RL1-487 | 4.68 | | | | | | |
| IL1RL1-488 | 63.18 | | | | | | |
| IL1RL1-489 | 49.14 | | | | | | |

TABLE 6
Data for IL1RL2

| | | | | | | 100 nM | |
|---|---|---|---|---|---|---|---|
| | | | | | | FACS | EC50 |
| IL1RL2 | | kon (M-1 | | | Rmax | (MFI | FACS |
| Variant | yield | s-1) | koff (s-1) | KD (M) | (RU) | Ratio) | (nM) |
| IL1RL2-1 | | | | | | | |
| IL1RL2-2 | 37.44 | 7.69E+04 | 7.84E−04 | 1.02E−08 | 309.6 | 9.22 | |
| IL1RL2-3 | 7.02 | n.b. | n.b. | n.b. | n.b. | 1.97 | |
| IL1RL2-4 | 2.34 | n.b. | n.b. | n.b. | n.b. | 15.68 | |
| IL1RL2-5 | 32.76 | 1.26E+05 | 3.43E−04 | 2.72E−09 | 383.2 | 13.91 | 13.41 |
| IL1RL2-6 | 70.2 | | | | | | |
| IL1RL2-7 | 9.36 | | | | | | |
| IL1RL2-8 | 14.04 | | | | | 12.76 | |
| IL1RL2-9 | | | | | | | |
| IL1RL2-10 | 35.1 | n.b. | n.b. | n.b. | n.b. | 12.65 | |
| IL1RL2-11 | 35.1 | 4.04E+04 | 3.42E−04 | 8.48E−09 | 176.7 | 22.41 | |
| IL1RL2-12 | 35.1 | 4.02E+04 | 4.85E−04 | 1.21E−08 | 125.0 | 33.78 | 0.528 |
| IL1RL2-13 | 7.02 | n.b. | n.b. | n.b. | n.b. | 11.33 | |
| IL1RL2-14 | 2.34 | n.b. | n.b. | n.b. | n.b. | 42.10 | |
| IL1RL2-15 | 28.08 | 5.27E+04 | 2.18E−04 | 4.13E−09 | 302.5 | 14.40 | 0.6223 |
| IL1RL2-16 | 4.68 | | | | | 37.62 | |
| IL1RL2-17 | 30.42 | 1.66E+05 | 2.40E−04 | 1.45E−09 | 438.3 | 15.56 | 11.22 |
| IL1RL2-18 | 0 | n.b. | n.b. | n.b. | n.b. | | |
| IL1RL2-19 | 11.7 | | | | | 13.83 | |
| IL1RL2-20 | 18.72 | 1.11E+05 | 3.63E−04 | 3.28E−09 | 216.5 | 11.59 | 9.034 |
| IL1RL2-21 | 16.38 | n.b. | n.b. | n.b. | n.b. | 20.92 | |
| IL1RL2-22 | 25.74 | 3.50E+04 | 1.26E−04 | 3.59E−09 | 109.7 | 15.38 | 3.021 |
| IL1RL2-23 | 42.12 | 1.53E+04 | 1.24E−04 | 8.13E−09 | 1138.0 | 13.94 | |
| IL1RL2-24 | 37.44 | 9.72E+04 | 1.00E−05 | 1.03E−10 | 448.1 | 18.12 | |
| IL1RL2-25 | 7.02 | n.b. | n.b. | n.b. | n.b. | 16.54 | |
| IL1RL2-26 | 37.44 | n.b. | n.b. | n.b. | n.b. | 39.50 | |
| IL1RL2-27 | 28.08 | 1.08E+05 | 1.43E−04 | 1.32E−09 | 425.2 | 13.96 | 64.19 |
| IL1RL2-28 | 9.36 | | | | | 13.61 | |
| IL1RL2-29 | 124.02 | 2.65E+04 | 2.79E−04 | 1.05E−08 | 1340.8 | 5.46 | |
| IL1RL2-30 | 25.74 | 9.08E+04 | 1.94E−04 | 2.14E−09 | 279.3 | 10.17 | |
| IL1RL2-31 | 30.42 | 8.33E+04 | 3.18E−04 | 3.82E−09 | 313.3 | 7.16 | |
| IL1RL2-32 | 9.36 | | | | | 20.11 | |
| IL1RL2-33 | 7.02 | n.b. | n.b. | n.b. | n.b. | 15.21 | |
| IL1RL2-34 | | | | | | | |
| IL1RL2-35 | 46.8 | 1.25E+05 | 5.93E−04 | 4.74E−09 | 259.1 | 15.62 | 0.5077 |
| IL1RL2-36 | 23.4 | | | | | 13.98 | |
| IL1RL2-37 | 53.82 | | | | | 16.86 | |
| IL1RL2-38 | 37.44 | | | | | 7.41 | |
| IL1RL2-39 | 2.34 | | | | | 15.32 | |
| IL1RL2-40 | 0 | | | | | 31.03 | |
| IL1RL2-41 | 25.74 | | | | | 5.33 | |
| IL1RL2-42 | 30.42 | | | | | 2.47 | |
| IL1RL2-43 | 23.4 | | | | | 1.62 | |
| IL1RL2-44 | 51.48 | | | | | 0.95 | |
| IL1RL2-45 | 4.68 | | | | | 6.82 | |
| IL1RL2-46 | 2.34 | | | | | 15.56 | |
| IL1RL2-47 | 28.08 | | | | | 13.19 | |
| IL1RL2-48 | 42.12 | | | | | 7.83 | |
| IL1RL2-49 | 2.34 | | | | | 189.92 | |
| IL1RL2-50 | 446.94 | | | | | 151.25 | |
| IL1RL2-51 | 9.36 | | | | | 9.68 | |
| IL1RL2-52 | 46.8 | | | | | 6.88 | |
| IL1RL2-53 | 7.02 | | | | | 4.14 | |
| IL1RL2-54 | 2.34 | | | | | 21.08 | |
| IL1RL2-55 | 2.34 | | | | | 49.73 | |
| IL1RL2-56 | 9.36 | | | | | 3.83 | |
| IL1RL2-57 | 16.38 | | | | | | |
| IL1RL2-58 | 49.14 | | | | | | |
| IL1RL2-59 | 88.92 | | | | | | |
| IL1RL2-60 | 203.58 | | | | | | |
| IL1RL2-61 | 241.02 | | | | | | |
| IL1RL2-62 | 341.64 | | | | | | |
| IL1RL2-63 | 14.04 | | | | | | |
| IL1RL2-64 | | | | | | | |
| IL1RL2-65 | 212.94 | | | | | | |
| IL1RL2-66 | 285.48 | | | | | | |
| IL1RL2-67 | 156.78 | | | | | | |
| IL1RL2-68 | 35.1 | | | | | | |
| IL1RL2-69 | 14.04 | | | | | | |
| IL1RL2-70 | 4.68 | | | | | | |
| IL1RL2-71 | 37.44 | | | | | | |
| IL1RL2-72 | 187.2 | | | | | | |
| IL1RL2-73 | 37.44 | | | | | | |
| IL1RL2-74 | 173.16 | | | | | | |
| IL1RL2-75 | 299.52 | | | | | | |
| IL1RL2-76 | 170.82 | | | | | | |
| IL1RL2-77 | 168.48 | | | | | | |
| IL1RL2-78 | 217.62 | | | | | | |
| IL1RL2-79 | 332.28 | | | | | | |
| IL1RL2-80 | 35.1 | | | | | | |
| IL1RL2-81 | 219.96 | | | | | | |
| IL1RL2-82 | 182.52 | | | | | | |
| IL1RL2-83 | 229.32 | | | | | | |
| IL1RL2-84 | 343.98 | | | | | | |
| IL1RL2-85 | 402.48 | | | | | | |
| IL1RL2-86 | 325.26 | | | | | | |
| IL1RL2-87 | 98.28 | | | | | | |
| IL1RL2-88 | 30.42 | | | | | | |
| IL1RL2-89 | 7.02 | | | | | | |
| IL1RL2-90 | 351 | | | | | | |
| IL1RL2-91 | 397.8 | | | | | | |
| IL1RL2-92 | 243.36 | | | | | | |
| IL1RL2-93 | 44.46 | | | | | | |
| IL1RL2-94 | 42.12 | | | | | | |
| IL1RL2-95 | 4.68 | | | | | | |
| IL1RL2-96 | 2.34 | | | | | | |
| IL1RL2-97 | 234 | | | | | | |
| IL1RL2-98 | 341.64 | | | | | | |
| IL1RL2-99 | 259.74 | | | | | | |
| IL1RL2-100 | 117 | | | | | | |
| IL1RL2-101 | | | | | | | |
| IL1RL2-102 | 18.72 | | | | | | |
| IL1RL2-103 | 360.36 | | | | | | |
| IL1RL2-104 | 25.74 | | | | | | |
| IL1RL2-105 | | | | | | | |
| IL1RL2-106 | 383.76 | | | | | | |
| IL1RL2-107 | 297.18 | | | | | | |
| IL1RL2-108 | 231.66 | | | | | | |
| IL1RL2-109 | 156.78 | | | | | | |
| IL1RL2-110 | | | | | | | |
| IL1RL2-111 | 304.2 | | | | | | |
| IL1RL2-112 | 9.36 | | | | | | |
| IL1RL2-113 | 112.32 | | | | | | |
| IL1RL2-114 | 93.6 | | | | | | |
| IL1RL2-115 | 14.04 | | | | | | |
| IL1RL2-116 | 70.2 | | | | | | |
| IL1RL2-117 | 4.68 | | | | | | |
| IL1RL2-118 | 2.34 | | | | | | |
| IL1RL2-119 | 156.78 | | | | | | |
| IL1RL2-120 | 180.18 | | | | | | |
| IL1RL2-121 | 11.7 | | | | | | |
| IL1RL2-122 | 32.76 | | | | | | |
| IL1RL2-123 | 18.72 | | | | | | |
| IL1RL2-124 | 4.68 | | | | | | |
| IL1RL2-125 | | | | | | | |
| IL1RL2-126 | 37.44 | | | | | | |
| IL1RL2-127 | 14.04 | | | | | | |
| IL1RL2-128 | 4.68 | | | | | | |
| IL1RL2-129 | 9.36 | | | | | | |
| IL1RL2-130 | 9.36 | | | | | | |
| IL1RL2-131 | 156.78 | | | | | | |
| IL1RL2-132 | 196.56 | | | | | | |
| IL1RL2-133 | 44.46 | | | | | | |
| IL1RL2-134 | 28.08 | | | | | | |
| IL1RL2-135 | 16.38 | | | | | | |
| IL1RL2-136 | 102.96 | | | | | | |
| IL1RL2-137 | 2.34 | | | | | | |
| IL1RL2-138 | 9.36 | | | | | | |
| IL1RL2-139 | 9.36 | | | | | | |
| IL1RL2-140 | 191.88 | | | | | | |
| IL1RL2-141 | 91.26 | | | | | | |
| IL1RL2-142 | 187.2 | | | | | | |
| IL1RL2-143 | 21.06 | | | | | | |
| IL1RL2-144 | 32.76 | | | | | | |
| IL1RL2-145 | 194.22 | | | | | | |
| IL1RL2-146 | 182.52 | | | | | | |
| IL1RL2-147 | 95.94 | | | | | | |
| IL1RL2-148 | 95.94 | | | | | | |
| IL1RL2-149 | 175.5 | | | | | | |
| IL1RL2-150 | 30.42 | | | | | | |
| IL1RL2-151 | 42.12 | | | | | | |
| IL1RL2-152 | 56.16 | | | | | | |
| IL1RL2-153 | 0 | | | | | 349.98 | 445.1 |
| IL1RL2-154 | 9.36 | | | | | | |
| IL1RL2-155 | 98.28 | | | | | | |
| IL1RL2-156 | 4.68 | | | | | 0.69 | |
| IL1RL2-157 | 70.2 | | | | | | |
| IL1RL2-158 | 191.88 | | | | | 14.83 | |
| IL1RL2-159 | 88.92 | | | | | | |
| IL1RL2-160 | 180.18 | | | | | | |
| IL1RL2-161 | 93.6 | | | | | | |
| IL1RL2-162 | 7.02 | | | | | 4.26 | |
| IL1RL2-163 | 102.96 | | | | | | |
| IL1RL2-164 | 114.66 | | | | | | |
| IL1RL2-165 | 2.34 | | | | | 706.60 | 34.5 |
| IL1RL2-166 | 11.7 | | | | | | |
| IL1RL2-167 | 32.76 | | | | | 3.08 | |
| IL1RL2-168 | 9.36 | | | | | | |
| IL1RL2-169 | 121.68 | | | | | | |
| IL1RL2-170 | 161.46 | | | | | 3.95 | |
| IL1RL2-171 | 16.38 | | | | | | |
| IL1RL2-172 | 21.06 | | | | | 2.63 | |
| IL1RL2-173 | 28.08 | | | | | 11.25 | |
| IL1RL2-174 | | | | | | | |
| IL1RL2-175 | 42.12 | | | | | 3.12 | |
| IL1RL2-176 | 16.38 | | | | | 0.72 | |
| IL1RL2-177 | 11.7 | | | | | 3.76 | |
| IL1RL2-178 | 72.54 | | | | | 36.99 | |
| IL1RL2-179 | 16.38 | | | | | 17.66 | 27.53 |
| IL1RL2-180 | 46.8 | | | | | 21.46 | 15.21 |
| IL1RL2-181 | 44.46 | | | | | 1.02 | |
| IL1RL2-182 | | | | | | | |
| IL1RL2-183 | 4.68 | | | | | | |
| IL1RL2-184 | 21.06 | | | | | 3.19 | |
| IL1RL2-185 | 2.34 | | | | | 205.46 | |
| IL1RL2-186 | 100.62 | | | | | | |
| IL1RL2-187 | 105.3 | | | | | 44.95 | 2.261 |
| IL1RL2-188 | 39.78 | | | | | | |
| IL1RL2-189 | 49.14 | | | | | | |
| IL1RL2-190 | 95.94 | | | | | | |
| IL1RL2-191 | 74.88 | | | | | | |
| IL1RL2-192 | 23.4 | | | | | | |
| IL1RL2-193 | 102.96 | | | | | | |
| IL1RL2-194 | | | | | | | |
| IL1RL2-195 | 30.42 | | | | | | |
| IL1RL2-196 | 72.54 | | | | | | |
| IL1RL2-197 | 77.22 | | | | | | |
| IL1RL2-198 | 105.3 | | | | | | |
| IL1RL2-199 | 65.52 | | | | | | |
| IL1RL2-200 | 63.18 | | | | | | |
| IL1RL2-201 | 53.82 | | | | | | |
| IL1RL2-202 | 44.46 | | | | | | |
| IL1RL2-203 | 23.4 | | | | | | |
| IL1RL2-204 | 30.42 | | | | | | |
| IL1RL2-205 | 39.78 | | | | | | |
| IL1RL2-206 | 37.44 | | | | | | |
| IL1RL2-207 | 39.78 | | | | | | |
| IL1RL2-208 | 63.18 | | | | | | |
| IL1RL2-209 | 30.42 | | | | | | |
| IL1RL2-210 | 32.76 | | | | | | |
| IL1RL2-211 | 100.62 | | | | | | |
| IL1RL2-212 | 58.5 | | | | | | |
| IL1RL2-213 | 51.48 | | | | | | |
| IL1RL2-214 | 42.12 | | | | | | |
| IL1RL2-215 | 44.46 | | | | | | |
| IL1RL2-216 | 79.56 | | | | | | |
| IL1RL2-217 | 81.9 | | | | | | |
| IL1RL2-218 | 51.48 | | | | | | |
| IL1RL2-219 | 16.38 | | | | | | |
| IL1RL2-220 | 84.24 | | | | | | |
| IL1RL2-221 | 91.26 | | | | | | |
| IL1RL2-222 | 88.92 | | | | | | |
| IL1RL2-223 | 74.88 | | | | | | |
| IL1RL2-224 | 53.82 | | | | | | |
| IL1RL2-225 | 49.14 | | | | | | |
| IL1RL2-226 | 23.4 | | | | | | |
| IL1RL2-227 | 28.08 | | | | | | |
| IL1RL2-228 | 77.22 | | | | | | |
| IL1RL2-229 | 67.86 | | | | | | |
| IL1RL2-230 | 42.12 | | | | | | |
| IL1RL2-231 | 23.4 | | | | | | |
| IL1RL2-232 | 11.7 | | | | | | |
| IL1RL2-233 | 77.22 | | | | | | |
| IL1RL2-234 | 86.58 | | | | | | |
| IL1RL2-235 | 44.46 | | | | | | |
| IL1RL2-236 | 42.12 | | | | | | |
| IL1RL2-237 | 58.5 | | | | | | |
| IL1RL2-238 | | | | | | | |
| IL1RL2-239 | 30.42 | | | | | | |
| IL1RL2-240 | 91.26 | | | | | | |
| IL1RL2-241 | 23.4 | | | | | | |
| IL1RL2-242 | 16.38 | | | | | | |
| IL1RL2-243 | 25.74 | | | | | | |
| IL1RL2-244 | 32.76 | | | | | | |
| IL1RL2-245 | 28.08 | | | | | | |
| IL1RL2-246 | 42.12 | | | | | | |
| IL1RL2-247 | 44.46 | | | | | | |
| IL1RL2-248 | 30.42 | | | | | | |
| IL1RL2-249 | 168.48 | | | | | | |
| IL1RL2-250 | 18.72 | | | | | | |
| IL1RL2-251 | 53.82 | | | | | | |
| IL1RL2-252 | 35.1 | | | | | | |
| IL1RL2-253 | 18.72 | | | | | | |
| IL1RL2-254 | 131.04 | | | | | | |
| IL1RL2-255 | 18.72 | | | | | | |
| IL1RL2-256 | 14.04 | | | | | | |
| IL1RL2-257 | 138.06 | | | | | | |
| IL1RL2-258 | 72.54 | | | | | | |
| IL1RL2-259 | 32.76 | | | | | | |
| IL1RL2-260 | 117 | | | | | | |
| IL1RL2-261 | 63.18 | | | | | | |
| IL1RL2-262 | 112.32 | | | | | | |
| IL1RL2-263 | 23.4 | | | | | | |
| IL1RL2-264 | 72.54 | | | | | | |
| IL1RL2-265 | 60.84 | | | | | | |
| IL1RL2-266 | | | | | | | |
| IL1RL2-267 | 67.86 | | | | | | |
| IL1RL2-268 | 149.76 | | | | | | |
| IL1RL2-269 | | | | | | | |
| IL1RL2-270 | 30.42 | | | | | | |
| IL1RL2-271 | 37.44 | | | | | | |
| IL1RL2-272 | 16.38 | | | | | | |
| IL1RL2-273 | 11.7 | | | | | | |
| IL1RL2-274 | 14.04 | | | | | | |
| IL1RL2-275 | 35.1 | | | | | | |
| IL1RL2-276 | 56.16 | | | | | | |
| IL1RL2-277 | 32.76 | | | | | | |
| IL1RL2-278 | 28.08 | | | | | | |
| IL1RL2-279 | 9.36 | | | | | | |
| IL1RL2-280 | 77.22 | | | | | | |
| IL1RL2-281 | 63.18 | | | | | | |
| IL1RL2-282 | 11.7 | | | | | | |
| IL1RL2-283 | 11.7 | | | | | 3.98 | |
| IL1RL2-284 | 35.1 | | | | | 8.71 | |
| IL1RL2-285 | 0 | | | | | 213.96 | 618.4 |
| IL1RL2-286 | 11.7 | | | | | | |
| IL1RL2-287 | 156.78 | | | | | | |
| IL1RL2-288 | 44.46 | | | | | 4.23 | |
| IL1RL2-289 | 74.88 | | | | | 5.31 | |
| IL1RL2-290 | 32.76 | | | | | 8.40 | |
| IL1RL2-291 | 11.7 | | | | | | |
| IL1RL2-292 | 98.28 | | | | | 11.67 | |
| IL1RL2-293 | 4.68 | | | | | 10.21 | |
| IL1RL2-294 | 65.52 | | | | | | |
| IL1RL2-295 | 32.76 | | | | | 3.07 | |
| IL1RL2-296 | 91.26 | | | | | 19.87 | |
| IL1RL2-297 | 4.68 | | | | | 7.44 | |
| IL1RL2-298 | 7.02 | | | | | 49.56 | 100.2 |
| IL1RL2-299 | 109.98 | | | | | 19.16 | 2.251 |
| IL1RL2-300 | 77.22 | | | | | 23.93 | 1.567 |
| IL1RL2-301 | 81.9 | | | | | 11.72 | |
| IL1RL2-302 | 74.88 | | | | | 191.66 | 1.097 |
| IL1RL2-303 | 46.8 | | | | | | |
| IL1RL2-304 | 9.36 | | | | | | |
| IL1RL2-305 | 9.36 | | | | | | |
| IL1RL2-306 | 16.38 | | | | | | |
| IL1RL2-307 | 21.06 | | | | | | |
| IL1RL2-308 | 18.72 | | | | | | |
| IL1RL2-309 | 9.36 | | | | | | |
| IL1RL2-310 | | | | | | | |
| IL1RL2-311 | 7.02 | | | | | | |
| IL1RL2-312 | 9.36 | | | | | | |
| IL1RL2-313 | | | | | | | |
| IL1RL2-314 | 53.82 | | | | | | |
| IL1RL2-315 | 9.36 | | | | | | |
| IL1RL2-316 | 21.06 | | | | | | |
| IL1RL2-317 | 9.36 | | | | | | |
| IL1RL2-318 | 53.82 | | | | | | |
| IL1RL2-319 | 9.36 | | | | | | |
| IL1RL2-320 | | | | | | | |
| IL1RL2-321 | 63.18 | | | | | | |
| IL1RL2-322 | | | | | | | |
| IL1RL2-323 | 77.22 | | | | | | |
| IL1RL2-324 | 86.58 | | | | | | |
| IL1RL2-325 | 25.74 | | | | | | |
| IL1RL2-326 | 11.7 | | | | | | |
| IL1RL2-327 | 9.36 | | | | | | |
| IL1RL2-328 | 58.5 | | | | | | |
| IL1RL2-329 | 7.02 | | | | | | |
| IL1RL2-330 | | | | | | | |
| IL1RL2-331 | 28.08 | | | | | | |
| IL1RL2-332 | 7.02 | | | | | | |
| IL1RL2-333 | | | | | | | |
| IL1RL2-334 | 56.16 | | | | | | |
| IL1RL2-335 | 91.26 | | | | | | |
| IL1RL2-336 | 93.6 | | | | | | |
| IL1RL2-337 | 58.5 | | | | | | |
| IL1RL2-338 | | | | | | | |
| IL1RL2-339 | | | | | | | |
| IL1RL2-340 | | | | | | | |
| IL1RL2-341 | 56.16 | | | | | | |
| IL1RL2-342 | 37.44 | | | | | | |
| IL1RL2-343 | | | | | | | |
| IL1RL2-344 | 9.36 | | | | | | |
| IL1RL2-345 | 98.28 | | | | | | |
| IL1RL2-346 | | | | | | | |
| IL1RL2-347 | 9.36 | | | | | | |
| IL1RL2-348 | | | | | | | |
| IL1RL2-349 | | | | | | | |
| IL1RL2-350 | 42.12 | | | | | | |
| IL1RL2-351 | | | | | | | |
| IL1RL2-352 | 46.8 | | | | | | |
| IL1RL2-353 | 95.94 | | | | | | |
| IL1RL2-354 | 70.2 | | | | | | |
| IL1RL2-355 | 28.08 | | | | | | |
| IL1RL2-356 | 46.8 | | | | | | |
| IL1RL2-357 | | | | | | | |
| IL1RL2-358 | | | | | | | |
| IL1RL2-359 | 9.36 | | | | | | |
| IL1RL2-360 | | | | | | | |
| IL1RL2-361 | 91.26 | | | | | | |
| IL1RL2-362 | 56.16 | | | | | | |
| IL1RL2-363 | | | | | | | |
| IL1RL2-364 | 14.04 | | | | | | |
| IL1RL2-365 | 79.56 | | | | | | |
| IL1RL2-366 | | | | | | | |
| IL1RL2-367 | 9.36 | | | | | | |
| IL1RL2-368 | 49.14 | | | | | | |
| IL1RL2-369 | 14.04 | | | | | | |
| IL1RL2-370 | 32.76 | | | | | | |
| IL1RL2-371 | | | | | | | |
| IL1RL2-372 | 9.36 | | | | | | |
| IL1RL2-373 | | | | | | | |
| IL1RL2-374 | 18.72 | | | | | | |
| IL1RL2-375 | | | | | | | |
| IL1RL2-376 | 39.78 | | | | | | |
| IL1RL2-377 | 63.18 | | | | | | |
| IL1RL2-378 | 16.38 | | | | | | |
| IL1RL2-379 | | | | | | | |
| IL1RL2-380 | | | | | | | |
| IL1RL2-381 | 49.14 | | | | | | |
| IL1RL2-382 | | | | | | | |
| IL1RL2-383 | | | | | | | |
| IL1RL2-384 | 70.2 | | | | | | |
| IL1RL2-385 | 32.76 | | | | | | |
| IL1RL2-386 | 121.68 | | | | | | |
| IL1RL2-387 | | | | | | | |
| IL1RL2-388 | | | | | | | |
| IL1RL2-389 | 88.92 | | | | | | |
| IL1RL2-390 | | | | | | | |
| IL1RL2-391 | | | | | | | |
| IL1RL2-392 | 25.74 | | | | | | |
| IL1RL2-393 | | | | | | | |
| IL1RL2-394 | 21.06 | | | | | | |
| IL1RL2-395 | 46.8 | | | | | | |
| IL1RL2-396 | | | | | | | |
| IL1RL2-397 | | | | | | | |

TABLE 7
Data for CD40L

| | | | | | | 100 nM | |
|---|---|---|---|---|---|---|---|
| | | | | | | FACS | EC50 |
| CD40L | | kon (M-1 | | | Rmax | (MFI | FACS |
| Variant | yield | s-1) | koff (s-1) | KD (M) | (RU) | Ratio) | (nM) |
| CD40L-1 | 322.92 | 9.56E+04 | 9.43E−05 | 9.86E−10 | 593.9 | 119.40 | |
| CD40L-2 | 276.12 | 2.28E+05 | 7.25E−04 | 3.18E−09 | 692.0 | 99.10 | |
| CD40L-3 | 365.04 | 5.47E+04 | 1.59E−04 | 2.91E−09 | 307.9 | 87.90 | |
| CD40L-4 | 28.08 | 2.52E+05 | 1.47E−03 | 5.82E−09 | 90.2 | 11.80 | |
| CD40L-5 | 311.22 | 6.62E+05 | 1.96E−04 | 2.95E−10 | 499.3 | 72.90 | |
| CD40L-6 | 334.62 | 2.51E+05 | 8.01E−05 | 3.19E−10 | 612.3 | 67.40 | |
| CD40L-7 | 245.7 | 1.74E+04 | 1.21E−04 | 6.93E−09 | 238.1 | 95.40 | |
| CD40L-8 | 224.64 | 2.91E+05 | 4.00E−04 | 1.37E−09 | 370.7 | 80.90 | |
| CD40L-9 | 226.98 | 2.51E+05 | 2.84E−04 | 1.13E−09 | 681.9 | 21.10 | |
| CD40L-10 | 456.3 | 3.07E+04 | 1.00E−05 | 3.26E−10 | 305.9 | 93.60 | |
| CD40L-11 | 313.56 | 6.51E+05 | 5.74E−04 | 8.82E−10 | 529.6 | 84.00 | |
| CD40L-12 | 269.1 | 2.57E+05 | 2.66E−04 | 1.03E−09 | 456.9 | 46.20 | |
| CD40L-13 | 343.98 | 8.88E+05 | 1.00E−05 | 1.13E−11 | 290.1 | 37.30 | |
| CD40L-14 | 131.04 | 3.03E+05 | 5.38E−04 | 1.78E−09 | 255.0 | 22.50 | |
| CD40L-15 | 365.04 | 2.99E+05 | 3.84E−04 | 1.29E−09 | 575.7 | 29.00 | |
| CD40L-16 | 306.54 | 3.51E+04 | 2.78E−04 | 7.93E−09 | 352.8 | 47.80 | |
| CD40L-17 | 358.02 | 1.57E+05 | 3.63E−04 | 2.32E−09 | 552.1 | 45.60 | |
| CD40L-18 | 313.56 | 2.21E+05 | 3.91E−04 | 1.77E−09 | 641.4 | 29.80 | |
| CD40L-19 | 283.14 | 1.77E+05 | 1.19E−03 | 6.72E−09 | 676.2 | 1.90 | |
| CD40L-20 | 369.72 | 2.17E+05 | 2.71E−04 | 1.25E−09 | 691.9 | 24.60 | |
| CD40L-21 | 365.04 | 1.54E+04 | 8.30E−04 | 5.38E−08 | 464.0 | 99.20 | |
| CD40L-22 | 407.16 | 3.87E+05 | 3.94E−04 | 1.02E−09 | 615.1 | 47.60 | |
| CD40L-23 | 374.4 | 1.85E+05 | 5.55E−04 | 3.00E−09 | 876.2 | 44.40 | |
| CD40L-24 | 334.62 | 1.43E+05 | 8.24E−04 | 5.74E−09 | 748.6 | 42.70 | |
| CD40L-25 | 386.1 | 1.47E+05 | 1.76E−04 | 1.20E−09 | 505.0 | 93.20 | |
| CD40L-26 | 336.96 | 4.29E+05 | 2.11E−04 | 4.91E−10 | 616.7 | 122.90 | |
| CD40L-27 | 348.66 | 2.07E+05 | 1.55E−04 | 7.49E−10 | 580.1 | 44.90 | |
| CD40L-28 | 395.46 | 1.55E+05 | 4.45E−04 | 2.87E−09 | 706.4 | 41.90 | |
| CD40L-29 | 369.72 | 2.38E+04 | 8.01E−04 | 3.36E−08 | 343.7 | 4.70 | |
| CD40L-30 | 301.86 | 1.57E+05 | 6.33E−04 | 4.04E−09 | 829.6 | 24.30 | |
| CD40L-31 | 21.06 | 8.93E+04 | 5.81E−04 | 6.50E−09 | 41.3 | 18.50 | |
| CD40L-32 | 336.96 | 2.27E+05 | 6.18E−05 | 2.72E−10 | 563.3 | 152.50 | |
| CD40L-33 | 142.74 | 2.08E+05 | 5.46E−04 | 2.63E−09 | 464.9 | 74.10 | |
| CD40L-34 | 306.54 | 6.45E+04 | 6.37E−04 | 9.87E−09 | 370.6 | 76.70 | |
| CD40L-35 | 446.94 | 1.19E+05 | 1.00E−05 | 8.42E−11 | 524.4 | 29.50 | |
| CD40L-36 | 397.8 | 4.31E+05 | 3.53E−04 | 8.19E−10 | 837.4 | 59.20 | |
| CD40L-37 | 393.12 | 8.33E+04 | 1.99E−04 | 2.39E−09 | 494.5 | 97.70 | |
| CD40L-38 | 231.66 | 6.03E+04 | 5.20E−04 | 8.61E−09 | 404.8 | 49.00 | |
| CD40L-39 | 346.32 | 3.22E+05 | 6.25E−05 | 1.94E−10 | 726.6 | 114.00 | |
| CD40L-40 | 334.62 | 3.96E+05 | 3.19E−04 | 8.06E−10 | 324.7 | 74.20 | |
| CD40L-41 | 360.36 | 8.08E+04 | 6.85E−04 | 8.47E−09 | 574.5 | 15.50 | |
| CD40L-42 | 290.16 | 2.60E+05 | 6.39E−04 | 2.46E−09 | 895.6 | 40.00 | |
| CD40L-43 | 362.7 | 6.90E+05 | 1.73E−04 | 2.51E−10 | 591.0 | 83.80 | |
| CD40L-44 | 23.4 | 1.47E+01 | 3.04E−01 | 2.06E−02 | 149649.6 | 4.90 | |
| CD40L-45 | 358.02 | 2.34E+05 | 1.06E−04 | 4.53E−10 | 647.1 | 93.90 | |
| CD40L-46 | 421.2 | 5.02E+04 | 5.76E−04 | 1.15E−08 | 674.0 | 45.70 | |
| CD40L-47 | 353.34 | 2.25E+05 | 5.36E−04 | 2.38E−09 | 736.8 | 41.80 | |
| CD40L-48 | 397.8 | 1.18E+05 | 9.98E−04 | 8.48E−09 | 801.7 | 68.40 | |
| CD40L-49 | 428.22 | 2.53E+04 | 1.21E−03 | 4.79E−08 | 363.7 | 36.80 | |
| CD40L-50 | 311.22 | 8.24E+05 | 5.77E−04 | 7.00E−10 | 514.3 | 130.80 | |
| CD40L-51 | 372.06 | 5.76E+04 | 1.00E−05 | 1.74E−10 | 246.5 | 76.60 | |
| CD40L-52 | 407.16 | 5.99E+04 | 4.53E−04 | 7.56E−09 | 349.6 | 91.90 | |
| CD40L-53 | 334.62 | 1.70E+06 | 1.67E−04 | 9.83E−11 | 242.9 | 104.50 | |
| CD40L-54 | 329.94 | 5.26E+05 | 3.99E−04 | 7.58E−10 | 387.7 | 100.20 | |
| CD40L-55 | 395.46 | 1.00E+04 | 1.00E−04 | 1.00E−08 | 0.0 | 3.20 | |
| CD40L-56 | 311.22 | 4.92E+05 | 2.08E−04 | 4.22E−10 | 494.5 | 68.40 | |
| CD40L-57 | 72.54 | 2.63E+05 | 7.69E−04 | 2.92E−09 | 476.6 | 64.00 | |
| CD40L-58 | 56.16 | 1.00E+04 | 1.00E−04 | 1.00E−08 | 0.0 | 28.00 | |
| CD40L-59 | 404.82 | 2.48E+05 | 3.15E−04 | 1.27E−09 | 792.4 | 66.70 | |
| CD40L-60 | 311.22 | 9.15E+05 | 1.08E−04 | 1.18E−10 | 673.2 | 50.40 | |
| CD40L-61 | 161.46 | | | | | | |
| CD40L-62 | 187.2 | | | | | | |
| CD40L-63 | 229.32 | | | | | | |
| CD40L-64 | 198.9 | | | | | 19.40 | |
| CD40L-65 | 159.12 | | | | | | |
| CD40L-66 | 156.78 | | | | | | |
| CD40L-67 | 105.3 | | | | | | |
| CD40L-68 | 37.44 | | | | | | |
| CD40L-69 | 23.4 | | | | | | |
| CD40L-70 | 145.08 | | | | | | |
| CD40L-71 | 28.08 | | | | | 5.90 | |
| CD40L-72 | 35.1 | | | | | | |
| CD40L-73 | 25.74 | | | | | 10.90 | |
| CD40L-74 | 23.4 | | | | | 8.70 | |
| CD40L-75 | 4.68 | | | | | | |
| CD40L-76 | 60.84 | | | | | 9.60 | |
| CD40L-77 | 18.72 | | | | | 2.70 | |
| CD40L-78 | 35.1 | | | | | 8.20 | |
| CD40L-79 | 119.34 | | | | | 4.90 | |
| CD40L-80 | 16.38 | | | | | 4.60 | |
| CD40L-81 | 21.06 | | | | | 6.00 | |
| CD40L-82 | 44.46 | | | | | 18.60 | |
| CD40L-83 | 86.58 | | | | | 15.70 | |
| CD40L-84 | 7.02 | | | | | 12.70 | |
| CD40L-85 | 28.08 | | | | | 42.60 | |
| CD40L-86 | 65.52 | | | | | 8.90 | |
| CD40L-87 | 67.86 | | | | | 18.30 | |
| CD40L-88 | 81.9 | | | | | 26.00 | |
| CD40L-89 | 51.48 | | | | | | |
| CD40L-90 | 119.34 | | | | | | |
| CD40L-91 | 58.5 | | | | | 4.30 | |
| CD40L-92 | 46.8 | | | | | 6.60 | |
| CD40L-93 | 77.22 | | | | | | |
| CD40L-94 | 18.72 | | | | | | |
| CD40L-95 | 14.04 | | | | | | |
| CD40L-96 | 49.14 | | | | | 3.70 | |
| CD40L-97 | 114.66 | | | | | 8.90 | |
| CD40L-98 | 124.02 | | | | | 6.40 | |
| CD40L-99 | 37.44 | | | | | 3.10 | |
| CD40L-100 | 142.74 | | | | | 4.30 | |
| CD40L-101 | 28.08 | | | | | | |
| CD40L-102 | 91.26 | | | | | 1.80 | |
| CD40L-103 | 147.42 | | | | | 3.60 | |
| CD40L-104 | 109.98 | | | | | | |
| CD40L-105 | 173.16 | | | | | 4.50 | |
| CD40L-106 | 65.52 | | | | | 2.70 | |
| CD40L-107 | 201.24 | | | | | 2.30 | |
| CD40L-108 | 128.7 | | | | | | |
| CD40L-109 | 44.46 | | | | | 4.70 | |
| CD40L-110 | 39.78 | | | | | 4.90 | |
| CD40L-111 | 168.48 | | | | | 9.70 | |
| CD40L-112 | 42.12 | | | | | | |
| CD40L-113 | 109.98 | | | | | | |
| CD40L-114 | 49.14 | | | | | 7.30 | |
| CD40L-115 | 109.98 | | | | | 16.80 | |
| CD40L-116 | 51.48 | | | | | | |
| CD40L-117 | 42.12 | | | | | 3.60 | |
| CD40L-118 | 2.34 | | | | | | |
| CD40L-119 | 95.94 | | | | | | |
| CD40L-120 | 93.6 | | | | | | |
| CD40L-121 | 56.16 | | | | | 6.90 | |
| CD40L-122 | 51.48 | | | | | 14.20 | |
| CD40L-123 | 72.54 | | | | | 6.70 | |
| CD40L-124 | 51.48 | | | | | 3.30 | |
| CD40L-125 | 107.64 | | | | | 6.60 | |
| CD40L-126 | 51.48 | | | | | | |
| CD40L-127 | 60.84 | | | | | 11.90 | |
| CD40L-128 | 35.1 | | | | | 1.60 | |
| CD40L-129 | 30.42 | | | | | | |
| CD40L-130 | 28.08 | | | | | 2.20 | |
| CD40L-131 | 23.4 | | | | | 12.10 | |
| CD40L-132 | 102.96 | | | | | 3.90 | |
| CD40L-133 | 9.36 | | | | | | |
| CD40L-134 | 91.26 | | | | | 7.30 | |
| CD40L-135 | 23.4 | | | | | | |
| CD40L-136 | 23.4 | | | | | 22.40 | |
| CD40L-137 | 51.48 | | | | | 7.70 | |
| CD40L-138 | 30.42 | | | | | 5.10 | |
| CD40L-139 | 9.36 | | | | | 2.10 | |
| CD40L-140 | 32.76 | | | | | 4.30 | |
| CD40L-141 | 11.7 | | | | | 2.00 | |
| CD40L-142 | 16.38 | | | | | | |
| CD40L-143 | 77.22 | | | | | 8.30 | |
| CD40L-144 | 16.38 | | | | | | |
| CD40L-145 | 30.42 | | | | | | |
| CD40L-146 | 70.2 | | | | | | |
| CD40L-147 | 49.14 | | | | | 7.40 | |
| CD40L-148 | 39.78 | | | | | 12.50 | |
| CD40L-149 | 60.84 | | | | | | |
| CD40L-150 | 121.68 | | | | | 2.80 | |
| CD40L-151 | 49.14 | | | | | | |
| CD40L-152 | 14.04 | | | | | | |
| CD40L-153 | 23.4 | | | | | 2.60 | |
| CD40L-154 | 124.02 | | | | | 1.90 | |
| CD40L-155 | 49.14 | | | | | | |
| CD40L-156 | 30.42 | | | | | 1.30 | |
| CD40L-157 | 14.04 | | | | | | |
| CD40L-158 | 25.74 | | | | | 1.50 | |
| CD40L-159 | 60.84 | | | | | 0.30 | |
| CD40L-160 | 56.16 | | | | | 0.30 | |
| CD40L-161 | 23.4 | | | | | 0.90 | |
| CD40L-162 | 142.74 | | | | | 0.30 | |
| CD40L-163 | 14.04 | | | | | | |
| CD40L-164 | 189.54 | | | | | 0.40 | |
| CD40L-165 | 140.4 | | | | | 0.50 | |
| CD40L-166 | 16.38 | | | | | 1.10 | |
| CD40L-167 | 18.72 | | | | | 1.40 | |
| CD40L-168 | 142.74 | | | | | 0.20 | |
| CD40L-169 | 42.12 | | | | | 0.40 | |
| CD40L-170 | 86.58 | | | | | 0.60 | |
| CD40L-171 | 215.28 | | | | | 0.40 | |
| CD40L-172 | 198.9 | | | | | 0.50 | |
| CD40L-173 | 276.12 | | | | | 0.40 | |
| CD40L-174 | 74.88 | | | | | 0.40 | |
| CD40L-175 | 70.2 | | | | | 0.40 | |
| CD40L-176 | 294.84 | | | | | 3.70 | |
| CD40L-177 | 93.6 | | | | | 8.90 | |
| CD40L-178 | 140.4 | | | | | 6.40 | |
| CD40L-179 | 175.5 | | | | | 3.10 | |
| CD40L-180 | 11.7 | | | | | 4.30 | |
| CD40L-181 | 14.04 | | | | | | |
| CD40L-182 | 21.06 | | | | | 1.80 | |
| CD40L-183 | 119.34 | | | | | 3.60 | |
| CD40L-184 | 42.12 | | | | | | |
| CD40L-185 | 46.8 | | | | | 4.50 | |
| CD40L-186 | 79.56 | | | | | 2.70 | |
| CD40L-187 | 119.34 | | | | | 2.30 | |
| CD40L-188 | 18.72 | | | | | | |
| CD40L-189 | 4.68 | | | | | 4.70 | |
| CD40L-190 | 70.2 | | | | | 4.90 | |
| CD40L-191 | 58.5 | | | | | 9.70 | |
| CD40L-192 | 35.1 | | | | | | |
| CD40L-193 | 30.42 | | | | | | |
| CD40L-194 | 28.08 | | | | | 7.30 | |
| CD40L-195 | 14.04 | | | | | 16.80 | |
| CD40L-196 | 28.08 | | | | | | |
| CD40L-197 | 30.42 | | | | | 3.60 | |
| CD40L-198 | 11.7 | | | | | | |
| CD40L-199 | 11.7 | | | | | | |
| CD40L-200 | | | | | | | |
| CD40L-201 | 23.4 | | | | | 6.90 | |
| CD40L-202 | 35.1 | | | | | 14.20 | |
| CD40L-203 | 9.36 | | | | | 6.70 | |
| CD40L-204 | 28.08 | | | | | 3.30 | |
| CD40L-205 | 11.7 | | | | | 6.60 | |
| CD40L-206 | 37.44 | | | | | | |
| CD40L-207 | 16.38 | | | | | 11.90 | |
| CD40L-208 | 28.08 | | | | | 1.60 | |
| CD40L-209 | 18.72 | | | | | | |
| CD40L-210 | 25.74 | | | | | 2.20 | |
| CD40L-211 | 0 | | | | | 12.10 | |
| CD40L-212 | 147.42 | | | | | 3.90 | |
| CD40L-213 | 16.38 | | | | | | |
| CD40L-214 | 9.36 | | | | | 7.30 | |
| CD40L-215 | 7.02 | | | | | | |
| CD40L-216 | 21.06 | | | | | 22.40 | |
| CD40L-217 | 25.74 | | | | | 7.70 | |
| CD40L-218 | 14.04 | | | | | 5.10 | |
| CD40L-219 | | | | | | 2.10 | |
| CD40L-220 | 91.26 | | | | | 4.30 | |
| CD40L-221 | 70.2 | | | | | | |
| CD40L-222 | | | | | | | |
| CD40L-223 | 72.54 | | | | | | |
| CD40L-224 | 49.14 | | | | | | |
| CD40L-225 | 58.5 | | | | | | |
| CD40L-226 | 86.58 | | | | | | |
| CD40L-227 | 70.2 | | | | | | |
| CD40L-228 | 63.18 | | | | | | |
| CD40L-229 | 63.18 | | | | | | |
| CD40L-230 | 35.1 | | | | | | |
| CD40L-231 | | | | | | | |
| CD40L-232 | 74.88 | | | | | 5.70 | |
| CD40L-233 | 81.9 | | | | | 1.80 | |
| CD40L-234 | 79.56 | | | | | | |
| CD40L-235 | 44.46 | | | | | | |
| CD40L-236 | 49.14 | | | | | | |
| CD40L-237 | 79.56 | | | | | | |
| CD40L-238 | 70.2 | | | | | | |
| CD40L-239 | 37.44 | | | | | 4.20 | |
| CD40L-240 | | | | | | | |
| CD40L-241 | 88.92 | | | | | 1.70 | |
| CD40L-242 | 35.1 | | | | | | |
| CD40L-243 | | | | | | | |
| CD40L-244 | 42.12 | | | | | | |
| CD40L-245 | 58.5 | | | | | | |
| CD40L-246 | 16.38 | | | | | | |
| CD40L-247 | 18.72 | | | | | | |
| CD40L-248 | 74.88 | | | | | | |
| CD40L-249 | 37.44 | | | | | | |
| CD40L-250 | 44.46 | | | | | 27.10 | |
| CD40L-251 | 126.36 | | | | | | |
| CD40L-252 | 81.9 | | | | | | |
| CD40L-253 | 53.82 | | | | | | |
| CD40L-254 | 53.82 | | | | | | |
| CD40L-255 | 44.46 | | | | | | |
| CD40L-256 | 44.46 | | | | | | |
| CD40L-257 | 32.76 | | | | | | |
| CD40L-258 | 25.74 | | | | | | |
| CD40L-259 | 58.5 | | | | | | |
| CD40L-260 | 37.44 | | | | | | |
| CD40L-261 | 11.7 | | | | | | |
| CD40L-262 | 25.74 | | | | | | |
| CD40L-263 | 35.1 | | | | | | |
| CD40L-264 | 44.46 | | | | | | |
| CD40L-265 | 46.8 | | | | | | |
| CD40L-266 | 18.72 | | | | | 1.70 | |
| CD40L-267 | 100.62 | | | | | | |
| CD40L-268 | 16.38 | | | | | | |
| CD40L-269 | 28.08 | | | | | | |
| CD40L-270 | 25.74 | | | | | | |
| CD40L-271 | 16.38 | | | | | | |
| CD40L-272 | 77.22 | | | | | | |
| CD40L-273 | 53.82 | | | | | | |
| CD40L-274 | 56.16 | | | | | | |
| CD40L-275 | 30.42 | | | | | 2.10 | |
| CD40L-276 | 11.7 | | | | | | |
| CD40L-277 | 21.06 | | | | | | |
| CD40L-278 | 102.96 | | | | | | |
| CD40L-279 | 42.12 | | | | | | |
| CD40L-280 | 39.78 | | | | | | |
| CD40L-281 | 28.08 | | | | | | |
| CD40L-282 | 56.16 | | | | | | |
| CD40L-283 | 93.6 | | | | | | |
| CD40L-284 | 16.38 | | | | | | |
| CD40L-285 | 81.9 | | | | | | |
| CD40L-286 | 30.42 | | | | | | |
| CD40L-287 | 77.22 | | | | | | |
| CD40L-288 | 32.76 | | | | | | |
| CD40L-289 | 67.86 | | | | | | |
| CD40L-290 | 9.36 | | | | | | |
| CD40L-291 | 28.08 | | | | | | |
| CD40L-292 | 74.88 | | | | | | |
| CD40L-293 | 77.22 | | | | | | |
| CD40L-294 | 21.06 | | | | | | |
| CD40L-295 | 109.98 | | | | | | |
| CD40L-296 | 152.1 | | | | | 3.40 | |
| CD40L-297 | 81.9 | | | | | | |
| CD40L-298 | 28.08 | | | | | | |
| CD40L-299 | 11.7 | | | | | | |
| CD40L-300 | 67.86 | | | | | | |
| CD40L-301 | 46.8 | | | | | | |
| CD40L-302 | 16.38 | | | | | | |
| CD40L-303 | 35.1 | | | | | 2.50 | |
| CD40L-304 | 30.42 | | | | | | |
| CD40L-305 | 74.88 | | | | | | |
| CD40L-306 | 44.46 | | | | | | |
| CD40L-307 | 53.82 | | | | | | |
| CD40L-308 | 124.02 | | | | | | |
| CD40L-309 | 23.4 | | | | | | |
| CD40L-310 | 21.06 | | | | | | |
| CD40L-311 | | | | | | | |
| CD40L-312 | | | | | | | |
| CD40L-313 | | | | | | | |
| CD40L-314 | 39.78 | | | | | | |
| CD40L-315 | 23.4 | | | | | | |
| CD40L-316 | 79.56 | | | | | | |
| CD40L-317 | 166.14 | | | | | | |
| CD40L-318 | 46.8 | | | | | | |
| CD40L-319 | 49.14 | | | | | 4.20 | |
| CD40L-320 | 37.44 | | | | | | |
| CD40L-321 | 74.88 | | | | | 1.70 | |
| CD40L-322 | | | | | | | |
| CD40L-323 | 208.26 | | | | | | |
| CD40L-324 | 21.06 | | | | | | |
| CD40L-325 | 135.72 | | | | | | |
| CD40L-326 | 177.84 | | | | | | |
| CD40L-327 | 53.82 | | | | | | |
| CD40L-328 | 107.64 | | | | | | |
| CD40L-329 | 86.58 | | | | | | |
| CD40L-330 | 121.68 | | | | | 27.10 | |
| CD40L-331 | 46.8 | | | | | | |
| CD40L-332 | 79.56 | | | | | | |
| CD40L-333 | 194.22 | | | | | | |
| CD40L-334 | | | | | | | |
| CD40L-335 | 100.62 | | | | | | |
| CD40L-336 | 138.06 | | | | | | |
| CD40L-337 | 7.02 | | | | | | |
| CD40L-338 | 7.02 | | | | | 34.30 | |
| CD40L-339 | 30.42 | | | | | 56.60 | |
| CD40L-340 | 67.86 | | | | | 61.50 | |
| CD40L-341 | 84.24 | | | | | 125.10 | |
| CD40L-342 | 105.3 | | | | | 124.50 | |
| CD40L-343 | 105.3 | | | | | 35.80 | |
| CD40L-344 | 25.74 | | | | | 4.90 | |
| CD40L-345 | 140.4 | | | | | 7.70 | |
| CD40L-346 | 159.12 | | | | | 2.70 | |
| CD40L-347 | 46.8 | | | | | 11.60 | |
| CD40L-348 | 84.24 | | | | | 6.20 | |
| CD40L-349 | 28.08 | | | | | 5.80 | |
| CD40L-350 | 114.66 | | | | | 66.40 | |
| CD40L-351 | 65.52 | | | | | 2.30 | |
| CD40L-352 | 18.72 | | | | | 4.70 | |
| CD40L-353 | 35.1 | | | | | 2.40 | |
| CD40L-354 | 79.56 | | | | | 6.90 | |
| CD40L-355 | 156.78 | | | | | 7.60 | |
| CD40L-356 | 74.88 | | | | | | |
| CD40L-357 | 77.22 | | | | | 2.20 | |
| CD40L-358 | 91.26 | | | | | 4.20 | |
| CD40L-359 | 72.54 | | | | | 5.10 | |
| CD40L-360 | 30.42 | | | | | 15.40 | |
| CD40L-361 | 86.58 | | | | | 5.50 | |
| CD40L-362 | 32.76 | | | | | 1055.00 | |
| CD40L-363 | 51.48 | | | | | 3.00 | |
| CD40L-364 | 60.84 | | | | | 6.80 | |
| CD40L-365 | 53.82 | | | | | 4.60 | |
| CD40L-366 | 28.08 | | | | | 43.00 | |
| CD40L-367 | 53.82 | | | | | 2.10 | |
| CD40L-368 | 77.22 | | | | | 1.90 | |
| CD40L-369 | 39.78 | | | | | 2.10 | |
| CD40L-370 | 25.74 | | | | | 2.50 | |
| CD40L-371 | 81.9 | | | | | 3.50 | |
| CD40L-372 | 79.56 | | | | | 8.50 | |
| CD40L-373 | 112.32 | | | | | 1.70 | |
| CD40L-374 | 65.52 | | | | | 2.40 | |
| CD40L-375 | 53.82 | | | | | 3.00 | |
| CD40L-376 | 37.44 | | | | | 13.50 | |
| CD40L-377 | 42.12 | | | | | | |
| CD40L-378 | 49.14 | | | | | 8.10 | |
| CD40L-379 | 16.38 | | | | | 71.20 | |
| CD40L-380 | 11.7 | | | | | 8.40 | |
| CD40L-381 | 37.44 | | | | | 1.70 | |
| CD40L-382 | 133.38 | | | | | 10.70 | |
| CD40L-383 | 112.32 | | | | | 24.10 | |
| CD40L-384 | 79.56 | | | | | | |
| CD40L-385 | 81.9 | | | | | 1.90 | |
| CD40L-386 | 16.38 | | | | | 1.60 | |
| CD40L-387 | 86.58 | | | | | | |
| CD40L-388 | 32.76 | | | | | 2.20 | |
| CD40L-389 | 37.44 | | | | | 2.50 | |
| CD40L-390 | 37.44 | | | | | | |
| CD40L-391 | 21.06 | | | | | 2.90 | |
| CD40L-392 | 39.78 | | | | | 2.00 | |
| CD40L-393 | | | | | | | |
| CD40L-394 | 23.4 | | | | | 2.30 | |
| CD40L-395 | 18.72 | | | | | 2.60 | |
| CD40L-396 | 44.46 | | | | | 6.20 | |
| CD40L-397 | 35.1 | | | | | 2.30 | |
| CD40L-398 | 63.18 | | | | | 45.10 | |
| CD40L-399 | | | | | | | |
| CD40L-400 | 35.1 | | | | | | |
| CD40L-401 | 58.5 | | | | | 1.80 | |
| CD40L-402 | 35.1 | | | | | | |
| CD40L-403 | 30.42 | | | | | 3.10 | |
| CD40L-404 | 70.2 | | | | | 7.10 | |
| CD40L-405 | 21.06 | | | | | 1.80 | |
| CD40L-406 | 21.06 | | | | | | |
| CD40L-407 | 11.7 | | | | | | |
| CD40L-408 | 74.88 | | | | | 2.80 | |
| CD40L-409 | 65.52 | | | | | | |
| CD40L-410 | 79.56 | | | | | 1.80 | |
| CD40L-411 | 58.5 | | | | | | |
| CD40L-412 | 56.16 | | | | | | |
| CD40L-413 | 42.12 | | | | | | |
| CD40L-414 | 65.52 | | | | | 11.20 | |
| CD40L-415 | 42.12 | | | | | | |
| CD40L-416 | 67.86 | | | | | 3.40 | |
| CD40L-417 | 58.5 | | | | | 1.70 | |
| CD40L-418 | 173.16 | | | | | 3.60 | |
| CD40L-419 | 51.48 | | | | | 18.60 | |
| CD40L-420 | 112.32 | | | | | | |
| CD40L-421 | 63.18 | | | | | 1.90 | |
| CD40L-422 | 93.6 | | | | | 1.80 | |
| CD40L-423 | 58.5 | | | | | | |
| CD40L-424 | 44.46 | | | | | | |
| CD40L-425 | 44.46 | | | | | 2.70 | |
| CD40L-426 | 74.88 | | | | | 2.80 | |
| CD40L-427 | 88.92 | | | | | | |
| CD40L-428 | 105.3 | | | | | | |
| CD40L-429 | 42.12 | | | | | 5.00 | |
| CD40L-430 | 105.3 | | | | | | |
| CD40L-431 | 74.88 | | | | | | |
| CD40L-432 | 67.86 | | | | | 2.20 | |
| CD40L-433 | 77.22 | | | | | | |
| CD40L-434 | 194.22 | | | | | 6.10 | |
| CD40L-435 | 81.9 | | | | | | |
| CD40L-436 | 121.68 | | | | | | |
| CD40L-437 | 35.1 | | | | | 4.30 | |
| CD40L-438 | 86.58 | | | | | 2.70 | |
| CD40L-439 | 98.28 | | | | | | |
| CD40L-440 | 18.72 | | | | | | |
| CD40L-441 | 14.04 | | | | | | |

### Example 5: Exemplary Sequences

TABLE 8
TSLP Variable Heavy Chain Domain Sequences

| TSLP | SEQ ID | |
|---|---|---|
| Variant | NO | VH Sequence |
| TSLP-1 | 1 | EVQLVESGGGLVQPGGSLRLSCAASGSAFRSTVMGWFRQAPGKEREGV |
| | | SFISGSDGSTYYADSVKGRFTISADNSKNTAYLQMNSLKPEDTAVYYCA |
| | | ADAPAGYYWGQGTLVTVSS |
| TSLP-2 | 2 | EVQLVESGGGLVQPGGSLRLSCAASGLTFSTTVMGWFRQAPGKEREWV |
| | | ATIAGDGSTFYADSVKGRFTISADNSKNTAYLQMNSLKPEDTAVYYCAD |
| | | INEDWGQGTLVTVSS |
| TSLP-3 | 3 | EVQLVESGGGLVQPGGSLRLSCAASGRIFSTYFMGWFRQAPGKERELVS |
| | | AIFSDGSTYYADSVKGRFTISADNSKNTAYLQMNSLKPEDTAVYYCALD |
| | | LSTVRWGQGTLVTVSS |
| TSLP-4 | 4 | EVQLVESGGGLVQPGGSLRLSCAASGFTFSSYWMGWFRQAPGKERELV |
| | | SAIFSDGSTMYADSVKGRFTISADNSKNTAYLQMNSLKPEDTAVYYCTR |
| | | DSTDTRYWGQGTLVTVSS |
| TSLP-5 | 5 | EVQLVESGGGLVQPGGSLRLSCAASGVTLDTDAMGWFRQAPGKEREFV |
| | | AWINNRGTTDYADSVKGRFTISADNSKNTAYLQMNSLKPEDTAVYYCA |
| | | RVSQWLLGGPANWGQGTLVTVSS |
| TSLP-6 | 6 | EVQLVESGGGLVQPGGSLRLSCAASGMTFSSYVMGWFRQAPGKEREFV |
| | | GEIILSKGFTYYADSVKGRFTISADNSKNTAYLQMNSLKPEDTAVYYCAS |
| | | GPGYYDSSAYYLYAFDIWGQGTLVTVSS |
| TSLP-7 | 7 | EVQLVESGGGLVQPGGSLRLSCAASGLTFGTHVMGWFRQAPGKERELV |
| | | TAINPAALTTYYADSVKGRFTISADNSKNTAYLQMNSLKPEDTAVYYCA |
| | | RDFWSAGDSWGQGTLVTVSS |
| TSLP-8 | 8 | EVQLVESGGGLVQPGGSLRLSCAASGRIFSTYFMGWFRQAPGKERELVS |
| | | AIFSDGSTYYADSVKGRFTISADNSKNTAYLQMNSLKPEDTAVYYCAKE |
| | | LEGDAFDVWGQGTLVTVSS |
| TSLP-9 | 9 | EVQLVESGGGLVQPGGSLRLSCAASGPMSSSAVMGWFRQAPGKEREAV |
| | | ALGWSGGSTYYADSVKGRFTISADNSKNTAYLQMNSLKPEDTAVYYCA |
| | | IHTSREIWGQGTLVTVSS |
| TSLP-10 | 10 | EVQLVESGGGLVQPGGSLRLSCAASGFTLDDYVMGWFRQAPGKEREGV |
| | | ATIAGGGTYYADSVKGRFTISADNSKNTAYLQMNSLKPEDTAVYYCASS |
| | | GSYYPGHFEWGQGTLVTVSS |
| TSLP-11 | 11 | EVQLVESGGGLVQPGGSLRLSCAASGFTFDDSDMGWFRQAPGKEREFV |
| | | GAISWSGDSTYYKYYADSVKGRFTISADNSKNTAYLQMNSLKPEDTAV |
| | | YYCANQYGWGQGTLVTVSS |
| TSLP-12 | 12 | EVQLVESGGGLVQPGGSLRLSCAASGFIFSSYWMGWFRQAPGKERELVS |
| | | AIFSDGSTYYADSVKGRFTISADNSKNTAYLQMNSLKPEDTAVYYCAID |
| | | WYLNSWGQGTLVTVSS |
| TSLP-13 | 13 | EVQLVESGGGLVQPGGSLRLSCAASGFTFDDNDMGWFRQAPGKEREFV |
| | | GAISWSGNTTYYKYYADSVKGRFTISADNSKNTAYLQMNSLKPEDTAV |
| | | YYCSNQYGWGQGTLVTVSS |
| TSLP-14 | 14 | EVQLVESGGGLVQPGGSLRLSCAASGSIFSSYWMGWFRQAPGKERELVS |
| | | AIFSDGSTYYADSVKGRFTISADNSKNTAYLQMNSLKPEDTAVYYCAKD |
| | | YFGTGWGQGTLVTVSS |
| TSLP-15 | 15 | EVQLVESGGGLVQPGGSLRLSCAASGFILDDYAMGWFRQAPGKEREFV |
| | | ATIAGGYTYYADSVKGRFTISADNSKNTAYLQMNSLKPEDTAVYYCPVF |
| | | DGYTRIHWGQGTLVTVSS |
| TSLP-16 | 16 | EVQLVESGGGLVQPGGSLRLSCAASGFSLDDYAMGWFRQAPGKEREGV |
| | | ATIAGGYTYYADSVKGRFTISADNSKNTAYLQMNSLKPEDTAVYYCAA |
| | | FDGYTGSDWGQGTLVTVSS |
| TSLP-17 | 17 | EVQLVESGGGLVQPGGSLRLSCAASGTTFEIYPMGWFRQAPGKEREFVA |
| | | AIHWNSGITYYADSVKGRFTISADNSKNTAYLQMNSLKPEDTAVYYCAR |
| | | DVFYFDSSGYSLWGQGTLVTVSS |
| TSLP-18 | 18 | EVQLVESGGGLVQPGGSLRLSCAASGNIFTRNIMCWFRQAPGKEREGVS |
| | | CISTGDGSTYYADSVKGRFTISADNSKNTAYLQMNSLKPEDTAVYYCAA |
| | | DSETSGNWVWGQGTLVTVSS |
| TSLP-19 | 19 | EVQLVESGGGLVQPGGSLRLSCAASGFILDYYVMGWFRQAPGKERELVS |
| | | AIFSDGSTLYADSVKGRFTIIADNSKNTAYLQMNSLKPEDTAVYYCAKG |
| | | GYTGCWSYDWGQGTLVTVSS |
| TSLP-20 | 20 | EVQLVESGGGLVQPGGSLRLSCAASGFKLGYYAMGWFRQAPGKEREGV |
| | | ATIAGGTTYYADSVKGRFTISADNSKNTAYLQMNSLKPEDTAVYYCAAI |
| | | GWRWGQGTLVTVSS |
| TSLP-21 | 21 | EVQLVESGGGLVQPGGSLRLSCAASGNIFSRYIMGWFRQAPGKERELVS |
| | | AIFSDGSTLYADSVKGRFTISADNSKNTAYLQMNSLKPEDTAVYYCAKG |
| | | GYSSGWFDYWGQGTLVTVSS |
| TSLP-22 | 22 | EVQLVESGGGLVQPGGSLRLSCAASGRTFRSYVMGWFRQAPGKERELV |
| | | SAIFSDGSTLYADSVKGRFTISADNSKNTAYLQMNSLKPEDTAVYYCAR |
| | | EDSSSGWFDYWGQGTLVTVSS |
| TSLP-23 | 23 | EVQLVESGGGLVQPGGSLRLSCAASGRIFSTYFMGWFRQAPGKERELVS |
| | | AIFSDGSTYYADSVKGRFTISADNSKNTAYLQMNSLKPEDTAVYYCALD |
| | | LSTVRWGQGTLVTVSS |
| TSLP-24 | 24 | EVQLVESGGGLVQPGGSLRLSCAASGGIFSINDIGWFRQAPGKEREFVAA |
| | | LSWIIGSGVYTYYADSVKGRFTISADNSKNTAYLQMNSLKPEDTAVYYC |
| | | ANEYGWGQGTLVTVSS |
| TSLP-25 | 25 | EVQLVESGGGLVQPGGSLRLSCAASGHIFSRYIMGWFRQAPGKERELVS |
| | | AIFSDGSTLYADSVKGRFTISADNSKNTAYLQMNSLKPEDTAVYYCAQG |
| | | GYGGGWFDYWGQGTLVTVSS |
| TSLP-26 | 26 | EVQLVESGGGLVQPGGSLRLSCAASGLTFSSYIMGWFRQAPGKERELVS |
| | | AIFSDGSTLYADSVKGRFTISADNSKNTAYLQMNSLKPEDTAVYYCARD |
| | | DYGGNFFDYWGQGTLVTVSS |
| TSLP-27 | 27 | EVQLVESGGGLVQPGGSLRLSCAASGSTFSDRAMGWFRQAPGKERELVS |
| | | AIFSDGSTLYADSVKGRFTISADNSKNTAYLQMNSLKPEDTAVYYCASD |
| | | VGMDVWGQGTLVTVSS |
| TSLP-28 | 28 | EVQLVESGGGLVQPGGSLRLSCAASGFTFDDYEMGWFRQAPGKEREFV |
| | | GSIGCDGSTLYADSVKGRFTISADNSKNTAYLQMNSLKPEDTAVYYCTT |
| | | DCDDHCGWGQGTLVTVSS |
| TSLP-29 | 29 | EVQLVESGGGLVQPGGSLRLSCAASGFTFDDYDMGWFRQAPGKEREFV |
| | | GAISWSGDSTYYKYYADSVKGRFTISADNSKNTAYLQMNNLKPEDTAV |
| | | YYCANQYGWGQGTLVTVSS |
| TSLP-30 | 30 | EVQLVESGGGLVQPGGSLRLSCAASGRTFSTYGMGWFRQAPGKEREFV |
| | | AAMISWNGGSSTYYADSVKGRFTISADNSKNTAYLQMNSLKPEDTAVY |
| | | YCTTDPAEFYDSSTYYPAPFDYWGQGTLVTVSS |
| TSLP-31 | 31 | EVQLVESGGGLVQPGGSLRLSCAASGNIFANNIMGWFRQAPGKERELVS |
| | | AIFSDGSTYYADSVKGRFTISADNSKNTAYLQMNSLKPEDTAVYYCARD |
| | | DIVGAWSLDCWGQGPLMTVSS |
| TSLP-32 | 32 | EVQLVESGGGLVQPGGSLRLSCAASGNSFNNYVMGWFRQAPGKEREM |
| | | VSAIFSDGSTYYADSVKGRFTISADNSKNTAYLQMNSLKPEDTAVYYCV |
| | | RDSGSVSGQTFDSWGQGTLVTVSS |
| TSLP-33 | 33 | EVQLVESGGGLVQPGGSLRLSCAASGFSLDYYGMGWFRQAPGKEREFV |
| | | AAIHWNGDSTLYADSVKGRFTIIADNSKNTAYLQMNSLKPEDTAVYYC |
| | | ARGFSGWFPFDYWGQGTLVTVSS |
| TSLP-34 | 34 | EVQLVESGGGLVQPGGSLRLSCAASGHIFANNIMGWFRQAPGKERELVS |
| | | AIFSDGSTYYADSVKGRFTISADNSKNTAYLQMNSLKPEDTAVYYCARD |
| | | AIVGAASLDYWGQGTLVTVSS |
| TSLP-35 | 35 | EVQLVESGGGLVQPGGSLRLSCAASGCIFSTYFMGWFRQAPGKERELVS |
| | | AIFSDGSTYYADSVKGRFTISADNSKNTAYLQMNSLKPEDTAVYYCALD |
| | | WNLNRWGQGTLVTVSS |
| TSLP-36 | 36 | EVQLVESGGGLVQPGGSLRLSCAASGGTLDDYVMGWFRQAPGKEREFV |
| | | GFIGSDGSTLYADSVKGRFTISADNSKNTAYLQMNSLKPEDTAVYYCTT |
| | | EWDGYWGQGTLVTVSS |
| TSLP-37 | 37 | EVQLVESGGGLVQPGGSLRLSCAASGFPLDDYAMGWFRQAPGKEREFV |
| | | GAISGSGDDTYYEDSVKGRFTISADNSKNTAYLQMNSLKPEDTAVYYW |
| | | VDPYSSSRWGQGTLVTVSS |
| TSLP-38 | 38 | EVQLVESGGGLVQPGGSLRLSCAASGFSLDYYAMGWFRQAPGKERELV |
| | | SAIFSDGSALYADSVKGRFTISADNSKNTAYLQMNSLKPEDTAVYYCAK |
| | | DRDTGIGAYDWGQGTLVTVSS |
| TSLP-39 | 39 | EVQLVESGGGLVQPGGSLRLSCAASGFGIDAMGWFRQAPGKERELVSAI |
| | | FIDGDTYYADSVKGRFTISADNSKNTAYLQMNSLKPEDTAVYYCVRDD |
| | | WGPSFWGQGTLVTVSS |
| TSLP-40 | 40 | EVQLVESGGGLVQPGGSLRLSCAASGLTFSRYAMGWFRQAPGKEREFVS |
| | | AIFSDGSTYYADSVKGRFTISADNSKNTAYLQMNSLKPEDTAVYYCARG |
| | | PNWFDPWGQGTLVTVSS |
| TSLP-41 | 41 | EVQLVESGGGLVQPGGSLRLSCAASGRTFSAHSVYTMGWFRQAPGKER |
| | | EWVSAIFSDGDTYYADSVKGRFTISADNSKNTAYLQMNSLKPEDTAVYY |
| | | CAIDEGMDYDGNFYDWGQGTLVTVSS |
| TSLP-42 | 42 | EVQLVESGGGLVQPGGSLRLSCAASGFILNYYGMGWFRQAPGKERELV |
| | | TAIFCNGSTSYADSVKGRFTISADNSKNTAYLQMNSLKPEDTAVYYCWA |
| | | HGFSGWFPFDYWGQGTLVTVSS |
| TSLP-43 | 43 | EVQLVESGGGLVQPGGSLRLSCAASGLTFSSYSMGWFRQAPGKERELVS |
| | | AIFSDGSTLYADSVKGRFTISADNSKNTAYLQMNSLKPEDTAVYYCARD |
| | | DYGGNFFDYWGQGTLVTVSS |
| TSLP-44 | 44 | EVQLVESGGGLVQPGGSLRLSCAASGRTLDRYGMGWFRQAPGKEREFV |
| | | AAISWSGGHTLYADSVKGRFTISADNSKNTAYLQMNSLKPEDTAVYYC |
| | | AIGGSLSWGQGTLVTVSS |
| TSLP-45 | 45 | EVQLVESGGGLVQPGGSLRLSCAASGNIFANNIMGWFRQAPGKERELVS |
| | | AIFSDGSTYYADSVKGRFTISADNSKNTAYLQMNSLKPEDTAVYYCARD |
| | | AIVGAASLDYWGQGTLVTVSS |
| TSLP-46 | 46 | EVQLVESGGGLVQPGGSLRLSCAASGFSLDYYGMGWFRQAPGKEREFV |
| | | AAIHWNGDSTLYADSVKGRFTISADNSKNTAYLQMNSLKPEDTAVYYC |
| | | ARGFSGWFPFDYWGQGTLVTVSS |
| TSLP-47 | 47 | EVQLVESGGGLVQPGGSLRLSCAASGSIFSINDMGWFRQAPGKEREFVA |
| | | AIDWSGDSTYYKYYADSVKGRFTISADNSKNTAYLQMNSLKPEDTAVY |
| | | YCANQYGWGQGTLVTVSS |
| TSLP-48 | 48 | EVQLVESGGGLVQPGGSLRLSCAASGRTFSNTLMCWFRQAPGKEREGVS |
| | | CITNDGSTYYADSVKGRFTISADNSKNTAYLQMNSLKPEDTAVYYCAID |
| | | PDGEWGQGTLVTVSS |
| TSLP-49 | 49 | EVQLVESGGGLVQPGGSLRLSCAASGRTFSNYAIVMGWFRQAPGKEREF |
| | | VGAIDWSGGSTYYADSVKGRFTISADNSKNTAYLQMNSLKPEDTAVYY |
| | | CAVISGLVQRDWGQGTLVTVSS |
| TSLP-50 | 50 | EVQLVESGGGLVQPGGSLRLSCAASGGIFSINDIGWFRQAPGKEREFVAA |
| | | LSIIGSGVYTYYADSVKGRFTISADNSKNTAYLQMNSLKPEDTAVYYCA |
| | | NEYGWGQGTLVTVSS |
| TSLP-51 | 51 | EVQLVESGGGLVQPGGSLRLSCAASGGTFSNYAMGWFRQAPGKERELV |
| | | AASRWSGGIKYYADSVKGRFTISADNSKNTAYLQMNSLKPEDTAVYYC |
| | | AAKTGTSFVWGQGTLVTVSS |
| TSLP-52 | 52 | EVQLVESGGGLVQPGGSLRLSCAASGISISTEVMGWFRQAPGKEREGVSF |
| | | ISGSDGSTYYADSVKGRFTISADNSKNTAYLQMNSLKPEDTAVYYCAAD |
| | | SPGGRSYEWGQGTLVTVSS |
| TSLP-53 | 53 | EVQLVESGGGLVQPGGSLRLSCAASGRTFSSNVMGWFRQAPGKEREFLA |
| | | TIISDGTKYYADSVKGRFTISADNSKNTAYLQMNSLKPEDTAVYYCAAD |
| | | SETSGNWVWGQGTLVTVSS |
| TSLP-54 | 54 | EVQLVESGGGLVQPGGSLRLSCAASGRAFSRSVSTMGWFRQAPGKEREL |
| | | VSAIFSDGSTLYADSVKGRFTISADNSKNTAYLQMNSLKPEDTAVYYCT |
| | | TDLQDYWGQGTLVTVSS |
| TSLP-55 | 55 | EVQLVESGGGLVQPGGSLRLSCAASGFTLGDYVMGWFRQAPGKEREGV |
| | | SFISGSDGSTYYADSVKGRFTISADNSKNTAYLQMNSLKPEDTAVYYCA |
| | | ADGPGGRSYEWGQGTLVTVSS |
| TSLP-56 | 56 | EVQLVESGGGLVQPGGSLRLSCAASGFTFSDTTMGWFRQAPGKEREFVG |
| | | TMVWSSDTIYYADSVKGRFTISADNSKNTAYLQMNSLKPEDTAVYYCA |
| | | FSPAYSPYFHLWGQGTLVTVSS |
| TSLP-57 | 57 | EVQLVESGGGLVQPGGSLRLSCAASGFTFGDYAMGWFRQAPGKEREFV |
| | | AGIESGGYTYYADSVKGRFTISADNSKNTAYLQMNSLKPEDTAVYYCA |
| | | NQYGWGQGTLVTVSS |
| TSLP-58 | 58 | EVQLVESGGGLVQPGGSLRLSCAASGNTFSGGFMGWFRQAPGKEREFL |
| | | ATIISDGTTYYADSVKGRFTISADNSKNTAYLQMNSLKPEDTAVYYCTT |
| | | DSGSYYGMDVWGQGTLVTVSS |
| TSLP-59 | 59 | EVQLVESGGGLVQPGGSLRLSCAASGSTFSDYVMGWFRQAPGKEREGV |
| | | SFISGSDGSTYYADSVKGRFTISADNSKNTAYLQMNSLKPEDTAVYYCA |
| | | RDFQYWGQGTLVTVSS |
| TSLP-60 | 60 | EVQLVESGGGLVQPGGSLRLSCAASGVTLDTYAMGWFRQAPGKEREM |
| | | VSAIFSDGSTYYADSVKGRFTISADNSKNTAYLQMNSLKPEDTAVYYCA |
| | | ADSPGGRSYEWGQGTLVTVSS |
| TSLP-61 | 61 | EVQLVESGGGLVQPGGSLRLSCAASGFTFDDSDMGWFRQAPGKEREFV |
| | | AAMNWSGVTTYHYYADSVKGRFTISADNSKNTAYLQMNSLKPEDTAV |
| | | YYCANQYGWGQGTLVTVSS |
| TSLP-62 | 62 | EVQLVESGGGLVQPGGSLRLSCAASGFTLDDSAMGWFRQAPGKEREGV |
| | | AAISSRDGSTYYADSVKGRFTISADNSKNTAYLQMNSLKPEDTAVYYCT |
| | | TFDDWGQGTLVTVSS |
| TSLP-63 | 63 | EVQLVESGGGLVQPGGSLRLSCAASGRTWNDLDMGWFRQAPGKEREFV |
| | | AAISGWSGGNIDYTYYADSVKGRFTISADNSKNTAYLQMNSLKPEDTAV |
| | | YYCANQYGWGQGTLVTVSS |
| TSLP-64 | 64 | EVQLVESGGGLVQPGGSLRLSCAASGSTGYMGWFRQAPGKEREGVSAIF |
| | | SDGSTYYADSVKGRFTISADNSKNTAYLQMNSLKPEDTAVYYCAAGSD |
| | | ASGGYDWGQGTLVTVSS |
| TSLP-65 | 65 | EVQLVESGGGLVQPGGSLRLSCAASGFTLGDYVMGWFRQAPGKEREGV |
| | | AAISSRDGSTYYADSVKGRFTISADNSKNTAYLQMNSLKPEDTAVYYCA |
| | | RDLADWGQGTLVTVSS |
| TSLP-66 | 66 | EVQLVESGGGLVQPGGSLRLSCAASGSTFSKAVMGWFRQAPGKEREGV |
| | | SFISGSDGSTYYADSVKGRFTISADNSKNTAYLQMNSLKPEDTAVYYCT |
| | | RFGESTDVWGQGTLVTVSS |
| TSLP-67 | 67 | EVQLVESGGGLVQPGGSLRLSCAASGNIFSHNAMGWFRQAPGKEREWV |
| | | SAIFSDGSTYYADSVKGRFTISADNSKNTAYLQMNSLKPEDTAVYYCAL |
| | | DIDYRDWGQGTLVTVSS |
| TSLP-68 | 68 | EVQLVESGGGLVQPGGSLRLSCAASGFGIDAMGWFRQAPGKERELVSAI |
| | | FSDGDTYADSVKGRFTISADNSKNTAYLQMNSLKPEDTAVYYCVRDDW |
| | | GPSFWGQGTLVTVSS |
| TSLP-69 | 69 | EVQLVESGGGLVQPGGSLRLSCAASGPTFDTYAMGWFRQAPGKEREHV |
| | | AAIFSDGSTYYADSVKGRFTISADNSKNTAYLQMNSLKPEDTAVYYCAR |
| | | DYGDVDSWGQGTLVTVSS |
| TSLP-70 | 70 | EVQLVESGGGLVQPGGSLRLSCAASGRSFSSYAMGWFRQAPGKEREFV |
| | | AAIFSDGSTYYADSVKGRFTISADNSKNTAYLQMNSLKPEDTAVYYCAR |
| | | EDSSSSWFDPWGQGTLVTVSS |
| TSLP-71 | 71 | EVQLVESGGGLVQPGGSLRLSCAASGRTSSSVTMGWFRQAPGKEREWM |
| | | GVIAYDGSTYADSVKGRFTISADNSKNTAYLQMNSLKPEDTAVYYCARS |
| | | DGGLDYWGQGTLVTVSS |
| TSLP-72 | 72 | EVQLVESGGGLVQPGGSLRLSCAASGDYYAMGWFRQAPGKERELVSAI |
| | | FSDGSTYYADSVKGRFTISADNSKNTAYLQMNSLKPEDTAVYYCARDG |
| | | EGQDLLDYWGQGTLVTVSS |
| TSLP-73 | 73 | EVQLVESGGGLVQPGGSLRLSCAASGRRFISNYAMGWFRQAPGKERELV |
| | | AATGRRGGPTYYADSVKGRFTISADNSKNTAYLQMNSLKPEDTAVYYC |
| | | AVISGLVQRDWGQGTLVTVSS |
| TSLP-74 | 74 | EVQLVESGGGLVQPGGSLRLSCAASGGTLVNYDMGWFRQAPGKEREFV |
| | | AGITSSGGYTYYADSVKGRFTISADNSKNTAYLQMNSLKPEDTAVYYCA |
| | | REGGLWGQGTLVTVSS |
| TSLP-75 | 75 | EVQLVESGGGLVQPGGSLRLSCAASGFTFSNYWMGWFRQAPGKERELV |
| | | SAIFSDGSTYYADSVKGRFTISADNSKNTAYLQMNSLKPEDTAVYYCAID |
| | | WYLNSWGQGTLVTVSS |
| TSLP-76 | 76 | EVQLVESGGGLVQPGGSLRLSCAASGRTFSMGWFRQAPGKEREFVAAIT |
| | | WGGSTTLYADSVKGRFTISADNSKNTAYLQMNSLKPEDTAVYYCAVPN |
| | | GNWGQGTLVTVSS |
| TSLP-77 | 77 | EVQLVESGGGLVQPGGSLRLSCAASGGRIFSTYFMGWFRQAPGKEREW |
| | | VSAIFSDGSTYYADSVKGRFTISADNSKNTAYLQMNSLKPEDTAVYYCA |
| | | RDVAGALDYWGQGTLVTVSS |
| TSLP-78 | 78 | EVQLVESGGGLVQPGGSLRLSCAASGRTSRSYGMGWFRQAPGKEREFV |
| | | GEIILSKGFTYYADSVKGRFTISADNSKNTAYLQMNSLKPEDTAVYYCA |
| | | NQYGWGQGTLVTVSS |
| TSLP-79 | 79 | EVQLVESGGGLVQPGGSLRLSCAASGRTSNIYAMGWFRQAPGKERELVS |
| | | AIFSDGSTYYADSVKGRFTISADNSKNTAYLQMNSLKPEDTAVYYCARN |
| | | GYSSSWFDYWGQGTLVTVSS |
| TSLP-80 | 80 | EVQLVESGGGLVQPGGSLRLSCAASGFTFSSYYMGWFRQAPGKERELV |
| | | ALIHTGGGTYYADSVKGRFTISADNSKNTAYLQMNSLKPEDTAVYYCA |
| | | AGASFGSIFWESAREYNWGQGTLVTVSS |
| TSLP-81 | 81 | EVQLVESGGGLVQPGGSLRLSCAASGRTLSDHDMGWFRQAPGKEREFV |
| | | AAINYSGGSTYYKYYADSVKGRFTISADNSKNTAYLQMNSLKPEDTAV |
| | | YYCANQYGWGQGTLVTVSS |
| TSLP-82 | 82 | EVQLVESGGGLVQPGGSLRLSCAASGFAFSTRVMGWFRQAPGKEREGV |
| | | SFISGSDGSTYYADSVKGRFTISADNSKNTAYLQMNSLKPEDTAVYYCA |
| | | AVSSNSETFDWGQGTLVTVSS |
| TSLP-83 | 83 | EVQLVESGGGLVQPGGSLRLSCAASGFSLDDYAMGWFRQAPGKEREGV |
| | | ATIAGGYTYYADSVKGRFTISADNSKNTAYLQMNSLKPEDTAVYYCAN |
| | | QYGWGQGTLVTVSS |
| TSLP-84 | 84 | EVQLVESGGGLVQPGGSLRLSCAASGRTFSVYAMGWFRQAPGKERELV |
| | | SAIFSDGTTYYADSVKGRFTISADNSKNTAYLQMNSLKPEDTAVYYCAL |
| | | DLSTVRWGQGTLVTVSS |
| TSLP-85 | 85 | EVQLVESGGGLVQPGGSLRLSCAASGFTFDDYDMGWFRQAPGKEREFV |
| | | AAISWTGDSTYYKYYADSVKGRFTISADNSKNTAYLQMNSLKPEDTAV |
| | | YYCANQYGWGQGTLVTVSS |
| TSLP-86 | 86 | EVQLVESGGGLVQPGGSLRLSCAASGISISTEIMGWFRQAPGKEREGVSFI |
| | | SGSDGSTYYADSVKGRFTISADNSKNTAYLQMNSLKPEDTAVYYCATSD |
| | | FAWGQGTLVTVSS |
| TSLP-87 | 87 | EVQLVESGGGLVQPGGSLRLSCAASGRTFSAHSVYTMGWFRQAPGKER |
| | | EWVSAIFSDGDTYADSVKGRFTISADNSKNTAYLQMNSLKPEDTAVYYC |
| | | AIDEGMDYDGNFYDWGQGTLVTVSS |
| TSLP-88 | 88 | EVQLVESGGGLVQPGGSLRLSCAASGFTFDDYVMGWFRQAPGKEREFV |
| | | VFIGSDHSTLYADSVKGRFTISADNSKNTAYLQMNSLKPEDTAVYYCGR |
| | | LDGAIDYWGQGTLVTVSS |
| TSLP-89 | 89 | EVQLVESGGGLVQPGGSLRLSCAASGGTLNNNPMAMGWFRQAPGKERE |
| | | LVSAIFSDGSTMYADSVKGRFTISADNSKNTAYLQMNSLKPEDTAVYYC |
| | | AADSETSGNWVWGQGTLVTVSS |
| TSLP-90 | 90 | EVQLVESGGGLVQPGGSLRLSCAASGSIFGLNAMGWFRQAPGKERELVS |
| | | AIFSDGSTIYADSVKGRFTISADNSKNTAYLQMNSLKPEDTAVYYCAKD |
| | | QGTSPYGMDVWGQGTLVTVSS |
| TSLP-91 | 91 | EVQLVESGGGLVQPGGSLRLSCAASGRTFSDDAMGWFRQAPGKEREFV |
| | | GEIILSKGFTYYADSVKGRFTISADNSKNTAYLQMNSLKPEDTAVYYCA |
| | | NQYGWGQGTLVTVSS |
| TSLP-92 | 92 | EVQLVESGGGLVQPGGSLRLSCAASGRIFSTYFMGWFRQAPGKERELVS |
| | | AIFSDGSTYYADSVKGRFTISADNSKNTAYLQMNSLKPEDTAVYYCANQ |
| | | YGWGQGTLVTVSS |
| TSLP-93 | 93 | EVQLVESGGGLVQPGGSLRLSCAASGLTFSRYAMGWFRQAPGKERELV |
| | | SAIFSDGSTYYADSVKGRFTISADNSKNTAYLQMNSLKPEDTAVYYCAR |
| | | GPNWFDPWGQGTLVTVSS |
| TSLP-94 | 94 | EVQLVESGGGLVQPGGSLRLSCAASGFTFSTSWMGWFRQAPGKEREFV |
| | | ADIMPYGSTEYADSVKGRFTISADNSKNTAYLQMNSLKPEDTAVYYCA |
| | | AFDGYTGSDWGQGTLVTVSS |
| TSLP-95 | 95 | EVQLVESGGGLVQPGGSLRLSCAASGSTISDRAMGWFRQAPGKERELVS |
| | | AIFSDGSTLYADSVKGRFTISADNSKNTAYLQMNSLKPEDTAVYYCASD |
| | | VGMDVWGQGTLVTVSS |
| TSLP-96 | 96 | EVQLVESGGGLVQPGGSLRLSCAASGGGTFGSFPMGWFRQAPGKERESV |
| | | SIDIDGLTYYADSVKGRFTISADNSKNTAYLQMNSLKPEDTAVYYCAAG |
| | | YDSLFAGYDWGQGTLVTVSS |
| TSLP-97 | 97 | EVQLVESGGGLVQPGGSLRLSCAASGISISTEIMGWFRQAPGKEREFVGT |
| | | MVWSSDTIYYADSVKGRFTISADNSKNTAYLQMNSLKPEDTAVYYCAR |
| | | DPGGYDYVWGQGTLVTVSS |
| TSLP-98 | 98 | EVQLVESGGGLVQPGGSLRLSCAASGRIFSTYFMGWFRQAPGKERELVS |
| | | AIFSDGSTYYADSVKGRFTISADNSKNTAYLQMNSLKPEDTAVYYCAAF |
| | | DGYTGSDWGQGTLVTVSS |
| TSLP-99 | 99 | EVQLVESGGGLVQPGGSLRLSCAASGRTFSSMGWFRQALGKEREFVAGI |
| | | SWTGGHTLYADSVKGRFTISADNSKNTAYLQMNSLKPEDTAVYYCAVP |
| | | NGNWGQGTLVTVSS |
| TSLP-100 | 100 | EVQLVESGGGLVQPGGSLRLSCAASGISISTEVMGWFRQAPGKEREFVA |
| | | GISWSGGSTDYADSVKGRFTISADNSKNTAYLQMNSLKPEDTAVYYCTT |
| | | DPSLLWFGELQLPLDYWGQGTLVTVSS |
| TSLP-101 | 101 | EVQLVESGGGLVQPGGSLRLSCAASGGTISTYAMGWFRQAPGKEREWV |
| | | SAIFSDGTKYYADSVKGRFTISADNSKNTAYLQMNSLKPEDTAVYYCTT |
| | | GRDFDYWGQGTLVTVSS |
| TSLP-102 | 102 | EVQLVESGGGLVQPGGSLRLSCAASGRTFSNYAIVMGWFRQAPGKERE |
| | | GVAAIYTGDGTTYYADSVKGRFTISADNSKNTAYLQMNSLKPEDTAVY |
| | | YCAADSETSGNWVWGQGTLVTVSS |
| TSLP-103 | 103 | EVQLVESGGGLVQPGGSLRLSCAASGFTFDYYAMGWFRQAPGKEREGV |
| | | AAIFSDGSTYYADSVKGRFTISADNSKNTAYLQMNSLKPEDTAVYYCAA |
| | | NVGVTGSYEWGQGTLVTVSS |
| TSLP-104 | 104 | EVQLVESGGGLVQPGGSLRLSCAASGFTLDDYVMGWFRQAPGKEREGV |
| | | SFISGSDGSTYYADSVKGRFTISADNSKNTAYLQMNSLKPEDTAVYYCA |
| | | ADGPGGRSYEWGQGTLVTVSS |
| TSLP-105 | 105 | EVQLVESGGGLVQPGGSLRLSCAASGGRALSNYAMGWFRQAPGKEREL |
| | | VAATGRRGGPTYYADSVKGRFTISADNSKNTAYLQMNSLKPEDTAVYY |
| | | CAVISGLVQRDWGQGTLVTVSS |
| TSLP-106 | 106 | EVQLVESGGGLVQPGGSLRLSCAASGRIFSTYFMGWFRQAPGKERELVS |
| | | AIFSDGSTYYADSVKGRFTISADNSKNTAYLQMNSLKPEDTAVYYCTRD |
| | | STDTRYWGQGTLVTVSS |
| TSLP-107 | 107 | EVQLVESGGGLVQPGGSLRLSCAASGFIFSSYWMGWFRQAPGKERELVS |
| | | AIFSDGSTYYADSVKGRFTISADNSKNTAYLQMNSLKPEDTAVYYCALD |
| | | LSTVRWGQGTLVTVSS |
| TSLP-108 | 108 | EVQLVESGGGLVQPGGSLRLSCAASGFTFSRSMGWFRQAPGKEREFVAG |
| | | ISWTGGHTLYADSVKGRFTISADNSKNTAYLQMNSLKPEDTAVYYCAVP |
| | | NGNWGQGTLVTVSS |
| TSLP-109 | 109 | EVQLVESGGGLVQPGGSLRLSCAASGGTLDDYVMGWFRQAPGKEREFV |
| | | AAITSDHITWYADSVKGRFTISADNSKNTAYLQMNSLKPEDTAVYYCTR |
| | | DGPGWELFGNWGQGTLVTVSS |
| TSLP-110 | 110 | EVQLVESGGGLVQPGGSLRLSCAASGRTSTVNGMGWFRQAPGKEREFV |
| | | ALISWSGGSTYYADSVKGRFTISADNSKNTAYLQMNSLKPEDTAVYYCA |
| | | ADVWGLGYDWGQGTLVTVSS |
| TSLP-111 | 111 | EVQLVESGGGLVQPGGSLRLSCAASGSISSINVMGWFRQAPGKERELVA |
| | | SIFTDDGDSYYADSVKGRFTISADNSKNTAYLQMNSLKPEDTAVYYCAR |
| | | EGPDGSYGLFDYWGQGTLVTVSS |
| TSLP-112 | 112 | EVQLVESGGGLVQPGGSLRLSCAASGTSITTYRYYMGWFRQAPGKEREL |
| | | VALIHTGGGTYYADSVKGRFTISADNSKNTAYLQMNSLKPEDTAVYYC |
| | | AAGASFGSIFWESAREYNWGQGTLVTVSS |
| TSLP-113 | 113 | EVQLVESGGGLVQPGGSLRLSCAASGSIFGFDSMGWFRQAPGKEREFVG |
| | | EIILSKGFTYYADSVKGRFTISADNSKNTAYLQMNSLKPEDTAVYYCAN |
| | | QYGWGQGTLVTVSS |
| TSLP-114 | 114 | EVQLVESGGGLVQPGGSLRLSCAASGLRFSDYVMGWFRQAPGKEREGV |
| | | SFISGSDGSTYYADSVKGRFTISADNSKNTAYLQMNSLKPEDTAVYYCA |
| | | TVGIPLNWGQGTLVTVSS |
| TSLP-115 | 115 | EVQLVESGGGLVQPGGSLRLSCAASGSDINFNVMGWFRQAPGKERELV |
| | | ALIFSGGSADYADSVKGRFTISADNSKNTAYLQMNSLKPEDTAVYYCAR |
| | | DATIFGVVTPFDYWGQGTLVTVSS |
| TSLP-116 | 116 | EVQLVESGGGLVQPGGSLRLSCAASGVTFNNYGMGWFRQAPGKEREFV |
| | | AGIESGGYTYYADSVKGRFTISADNSKNTAYLQMNSLKPEDTAVYYCA |
| | | APTGNWGQGTLVTVSS |
| TSLP-117 | 117 | EVQLVESGGGLVQPGGSLRLSCAASDRTFSGWFRQAPGKEREFVAAISM |
| | | SGDDTIYADSVKGRFTISADNSKNTAYLQMNSLKPEDTAVYYCARGGGP |
| | | IDYWGQGTLVTVSS |
| TSLP-118 | 118 | EVQLVESGGGLVQPGGSLRLSCAASGFSLDYYGMGWFRQAPGKEREMV |
| | | SAIFSDGSTYYADSVKGRFTISADNSKNTAYLQMNSLKPEDTAVYYCAS |
| | | ASQVGSGYDWGQGTLVTVSS |
| TSLP-119 | 119 | EVQLLESGGGLVQPGGSLRLSCAASGFTFRRYVMGWVRQAPGKGLEWV |
| | | SSISSTGFKTYYADSVKGRFTISRDNSKNTLYLQMNSLRAEDTAVYYCA |
| | | KSLGRLDYWGQGTLVTVSS |
| TSLP-120 | 120 | QVQLVQSGAEVKKPGSSVKVSCKASGGTFSTYAISWVRQAPGQGLEWM |
| | | GGIISINYAQKFQGRVTITADESTSTAYMELSSLRSEDTAVYYCAWGAKY |
| | | ALDSWGQGTLVTVSS |
| TSLP-121 | 121 | QVQLVQSGAEVKKPGSSVKVSCKASGGSFSSYAISWVRQAPGQGLEWM |
| | | GGIIPMNYAQKFQGRVTITADESTSTAYMELSSLRSEDTAVYYCARQLA |
| | | AALVYWGQGTLVTVSS |
| TSLP-122 | 122 | QVQLVQSGAEVKKPGSSVKVSCKASGGTFSSFGISWVRQAPGQGLEWM |
| | | GGIIPFNYAQKFQGRVTITADESTSTAYMELSSLRSEDTAVYYCAREGSY |
| | | HYGLDVWGQGTLVTVSS |
| TSLP-123 | 123 | EVQLLESGGGLVQPGGSLRLSCAASGFTFNKYPMMWVRQAPGKGLEW |
| | | VSAITGSGGSTYYADSVKGRFTISRDNSKNTLYLQMNSLRAEDTAVYYC |
| | | AKQIPGRKWTANGRKDYWGQGTLVTVSS |
| TSLP-124 | 124 | EVQLLESGGGLVQPGGSLRLSCAASGFTFDRYRMMWVRQAPGKGLEW |
| | | VSAITGSGGSTYYADSVKGRFTISRDNSKNTLYLQMNSLRAEDTAVYYC |
| | | AKYFHGKFDYWGQGTLVTVSS |
| TSLP-125 | 125 | EVQLLESGGGLVQPGGSLRLSCAASGFTFDRYRMMWVRQAPGKGLEW |
| | | VSAISGRGDNTYYADSVKGRFTISRDNSKNTLYLQMNSLRAEDTAVYYC |
| | | ARGRLFDYWGQGTLVTVSS |
| TSLP-126 | 126 | EVQLLESGGGLVQPGGSLRLSCAASGFTFEDYQMGWVRQAPGKGLEWV |
| | | STIDDLGRHTYYADSVKGRFTISRDNSKNTLYLQMNSLRAEDTAVYYCA |
| | | TAEDLPGYDYWGQGTLVTVSS |
| TSLP-127 | 127 | EVQLLESGGGLVQPGGSLRLSCAASGFTFNKYPMMWVRQAPGKGLEW |
| | | VSYISPIGPRTYYADSVKGRFTISRDNSKNTLYLQMNSLRAEDTAVYYCA |
| | | RVRRGGATDYWGQGTLVTVSS |
| TSLP-128 | 128 | EVQLLESGGGLVQPGGSLRLSCAASGFTFDRYRMMWVRQAPGKGLEW |
| | | VSAISGSGDKTYYADSVKGRFTISRDNSKNTLYLQMNSLRAEDTAVYYC |
| | | ARGRLFDYWGQGTLVTVSS |
| TSLP-129 | 129 | EVQLLESGGGLVQPGGSLRLSCAASGFTFGNYRMTWVRQAPGKGLEWV |
| | | SAISGSGGNTYYADSVKGRFTISRDNSKNTLYLQMNSLRAEDTAVYYCA |
| | | KGWRRFDYWGQGTLVTVSS |
| TSLP-130 | 130 | EVQLLESGGGLVQPGGSLRLSCAASGFTFRRYVMGWVRQAPGKGLEWV |
| | | SSISSTGFKTYYADSVKGRFTISRDNSKNTLYLQMNSLRAEDTAVYYCAR |
| | | GRLFDYWGQGTLVTVSS |
| TSLP-131 | 131 | EVQLLESGGGLVQPGGSLRLSCAASGFTFGAYPMYWVRQAPGKGLEWV |
| | | SRISVAGRRTAYADSVKGRFTISRDNSKNTLYLQMNSLRAEDTAVYYCA |
| | | KRGKQFDYWGQGTLVTVSS |
| TSLP-132 | 132 | EVQLLESGGGLVQPGGSLRLSCAASGFTFSRYGMHWVRQAPGKGLEWV |
| | | SAITGSGGSTYYADSVKGRFTISRDNSKNTLYLQMNSLRAEDTAVYYCA |
| | | RSYGGGFDYWGQGTLVTVSS |
| TSLP-133 | 133 | EVQLLESGGGLVQPGGSLRLSCAASGFTFGNYAMAWVRQAPGKGLEW |
| | | VSRISVAGRRTAYADSVKGRFTISRDNSKNTLYLQMNSLRAEDTAVYYC |
| | | ARPPKRGPRFDYWGQGTLVTVSS |
| TSLP-134 | 134 | EVQLLESGGGLVQPGGSLRLSCAASGFTFGNYRMTWVRQAPGKGLEWV |
| | | SSISGSSGTTYYADSVKGRFTISRDNSKNTLYLQMNSLRAEDTAVYYCAR |
| | | GRLFDYWGQGTLVTVSS |
| TSLP-135 | 135 | EVQLLESGGGLVQPGGSLRLSCAASGFTFDRYRMMWVRQAPGKGLEW |
| | | VSAISGRGDNTYYADSVKGRFTISRDNSKNTLYLQMNSLRAEDTAVYYC |
| | | AKGWRRFDYWGQGTLVTVSS |
| TSLP-136 | 136 | EVQLLESGGGLVQPGGSLRLSCAASGFTFDRYRMMWVRQAPGKGLEW |
| | | VSAISREGRATYYADSVKGRFTISRDNSKNTLYLQMNSLRAEDTAVYYC |
| | | GRVPYRSTWYPLYWGQGTLVTVSS |
| TSLP-137 | 137 | EVQLLESGGGLVQPGGSLRLSCAASGFTFGDHSMGWVRQAPGKGLEWV |
| | | SRISVAGRRTAYADSVKGRFTISRDNSKNTLYLQMNSLRAEDTAVYYCA |
| | | KGVRKGFDYWGQGTLVTVSS |
| TSLP-138 | 138 | EVQLLESGGGLVQPGGSLRLSCAASGFTFNKYPMMWVRQAPGKGLEW |
| | | VSRISVAGRRTAYADSVKGRFTISRDNSKNTLYLQMNSLRAEDTAVYYC |
| | | ARDRGGATTLDYWGQGTLVTVSS |
| TSLP-139 | 139 | EVQLLESGGGLVQPGGSLRLSCAASGFTFGQESMYWVRQAPGKGLEWV |
| | | SRISVAGRRTAYADSVKGRFTISRDNSKNTLYLQMNSLRAEDTAVYYCA |
| | | KRGKQFDYWGQGTLVTVSS |
| TSLP-140 | 140 | EVQLLESGGGLVQPGGSLRLSCAASGFTFDRYRMMWVRQAPGKGLEW |
| | | VSAISREGRATYYADSVKGRFTISRDNSKNTLYLQMNSLRAEDTAVYYC |
| | | GRVPYRSTWYPLYWGQGTLVTVSS |
| TSLP-141 | 141 | EVQLLESGGGLVQPGGSLRLSCAASGFTFGNYRMTWVRQAPGKGLEWV |
| | | SAISGNGGSTFYADSVKGRFTISRDNSKNTLYLQMNSLRAEDTAVYYCA |
| | | KGARRFDYWGQGTLVTVSS |
| TSLP-142 | 142 | EVQLLESGGGLVQPGGSLRLSCAASGFTFDRYRMMWVRQAPGKGLEW |
| | | VSAISGSGDKTYYADSVKGRFTISRDNSKNTLYLQMNSLRAEDTAVYYC |
| | | ARGRLFDYWGQGTLVTVSS |
| TSLP-143 | 143 | EVQLLESGGGLVQPGGSLRLSCAASGFTFGQESMYWVRQAPGKGLEWV |
| | | SRISVAGRRTAYADSVKGRFTISRDNSKNTLYLQMNSLRAEDTAVYYCA |
| | | KRGKQFDYWGQGTLVTVSS |
| TSLP-144 | 144 | EVQLLESGGGLVQPGGSLRLSCAASGFTFSPRRMSWVRQAPGKGLEWV |
| | | SAISGNGGSTFYADSVKGRFTISRDNSKNTLYLQMNSLRAEDTAVYYCA |
| | | RGNYFDYWGQGTLVTVSS |
| TSLP-145 | 145 | EVQLLESGGGLVQPGGSLRLSCAASGFTFGAYPMYWVRQAPGKGLEWV |
| | | SRISVAGRRTAYADSVKGRFTISRDNSKNTLYLQMNSLRAEDTAVYYCA |
| | | KSGRRFDYWGQGTLVTVSS |
| TSLP-146 | 146 | EVQLLESGGGLVQPGGSLRLSCAASGFTFGQESMYWVRQAPGKGLEWV |
| | | SRISVAGRRTAYADSVKGRFTISRDNSKNTLYLQMNSLRAEDTAVYYCA |
| | | KRGKQFDYWGQGTLVTVSS |
| TSLP-147 | 147 | EVQLLESGGGLVQPGGSLRLSCAASGFTFHKYGMAWVRQAPGKGLEW |
| | | VSIRGSSSSTYYADSVKGRFTISRDNSKNTLYLQMNSLRAEDTAVYYCA |
| | | KIRWNTAQVPVFDYWGQGTLVTVSS |
| TSLP-148 | 148 | EVQLLESGGGLVQPGGSLRLSCAASGFTFGAYPMYWVRQAPGKGLEWV |
| | | SRISVAGRRTAYADSVKGRFTISRDNSKNTLYLQMNSLRAEDTAVYYCA |
| | | KRGKQFDYWGQGTLVTVSS |
| TSLP-149 | 149 | EVQLLESGGGLVQPGGSLRLSCAASGFTFSRYFMGWVRQAPGKGLEWV |
| | | SSISGSSGTTYYADSVKGRFTISRDNSKNTLYLQMNSLRAEDTAVYYCAR |
| | | AGRILFDYWGQGTLVTVSS |
| TSLP-150 | 150 | EVQLLESGGGLVQPGGSLRLSCAASGFTFSRYAMNWVRQVPGKGLEWV |
| | | SYISPIGPRTYYADSVKGRFTISRDNSKNTLYLQMNSLRAEDTAVYYCAK |
| | | GLRRFDYWGQGTLVTVSS |
| TSLP-151 | 151 | EVQLLESGGGLVQPGGSLRLSCAASGFTFNKYPMMWVRQAPGKGLEW |
| | | VSRISVAGRRTAYADSVKGRFTISRDNSKNTLYLQMNSLRAEDTAVYYC |
| | | AGLPKRGPRFDYWGQGTLVTVSS |
| TSLP-152 | 152 | EVQLLESGGGLVQPGGSLRLSCAASGFTFHKYGMAWVRQAPGKGLEW |
| | | VSRISVAGRRTAYADSVKGRFTISRDNSKNTLYLQMNSLRAEDTAVYYC |
| | | AKQIPGRKWTANGRKDYWGQGTLVTVSS |
| TSLP-153 | 153 | EVQLLESGGGLVQPGGSLRLSCAASGFTFPKYDMMWVRQAPGKGLEW |
| | | VSRISVAGRRTAYADSVKGRFTISRDNSKNTLYLQMNSLRAEDTAVYYC |
| | | ATAEDLPGYDYWGQGTLVTVSS |
| TSLP-154 | 154 | EVQLLESGGGLVQPGGSLRLSCAASGFTFSDYPMYWVRQAPGKGLEWV |
| | | SRISVAGRRTAYADSVKGRFTISRDNSKNTLYLQMNSLRAEDTAVYYCA |
| | | KRSKAFDYWGQGTLVTVSS |
| TSLP-155 | 155 | EVQLLESGGGLVQPGGSLRLSCAASGFTFDRYRMMWVRQAPGKGLEW |
| | | VSAISREGRATYYADSVKGRFTISRDNSKNTLYLQMNSLRAEDTAVYYC |
| | | GRVPYRSTWYPLYWGQGTLVTVSS |
| TSLP-156 | 156 | EVQLLESGGGLVQPGGSLRLSCAASGFTFGNYAMAWVRQAPGKGLEW |
| | | VSRISVAGRRTAYADSVKGRFTISRDNSKNTLYLQMNSLRAEDTAVYYC |
| | | AKWATRGFDYWGQGTLVTVSS |
| TSLP-157 | 157 | EVQLLESGGGLVQPGGSLRLSCAASGFTFGAYPMYWVRQAPGKGLEWV |
| | | SRISVAGRRTAYADSVKGRFTISRDNSKNTLYLQMNSLRAEDTAVYYCA |
| | | KRSRLFDYWGQGTLVTVSS |
| TSLP-158 | 158 | EVQLLESGGGLVQPGGSLRLSCAASGFTFGQESMYWVRQAPGKGLEWV |
| | | SRISVAGRRTAYADSVKGRFTISRDNSKNTLYLQMNSLRAEDTAVYYCA |
| | | KRGKQFDYWGQGTLVTVSS |
| TSLP-159 | 159 | EVQLLESGGGLVQPGGSLRLSCAASGFTFRRYVMGWVRQAPGKGLEWV |
| | | SSIGANGAPTYYADSVKGRFTISRDNSKNTLYLQMNSLRAEDTAVYYCA |
| | | KRTRSKFDYWGQGTLVTVSS |
| TSLP-160 | 160 | EVQLLESGGGLVQPGGSLRLSCAASGFTFGAYPMYWVRQAPGKGLEWV |
| | | SRISVAGRRTAYADSVKGRFTISRDNSKNTLYLQMNSLRAEDTAVYYCA |
| | | KHGTGFDYWGQGTLVTVSS |
| TSLP-161 | 161 | EVQLLESGGGLVQPGGSLRLSCAASGFTFRRYVMGWVRQAPGKGLEWV |
| | | SRISVAGRRTAYADSVKGRFTISRDNSKNTLYLQMNSLRAEDTAVYYCA |
| | | RPPKRGPRFDYWGQGTLVTVSS |
| TSLP-162 | 162 | EVQLLESGGGLVQPGGSLRLSCAASGFTFNKYPMMWVRQAPGKGLEW |
| | | VSRISVAGRRTAYADSVKGRFTISRDNSKNTLYLQMNSLRAEDTAVYYC |
| | | AKAYTGRSYWGQGTLVTVSS |
| TSLP-163 | 163 | EVQLLESGGGLVQPGGSLRLSCAASGFTFDRYRMMWVRQAPGKGLEW |
| | | VSSIGANGAPTYYADSVKGRFTISRDNSKNTLYLQMNSLRAEDTAVYYC |
| | | AKSGRRFDYWGQGTLVTVSS |
| TSLP-164 | 164 | EVQLLESGGGLVQPGGSLRLSCAASGFTFHKYGMAWVRQAPGKGLEW |
| | | VSAISREGRATYYADSVKGRFTISRDNSKNTLYLQMNSLRAEDTAVYYC |
| | | AKRTRSKFDYWGQGTLVTVSS |
| TSLP-165 | 165 | EVQLLESGGGLVQPGGSLRLSCAASGFTFNHYDMGWVRQAPGKGLEW |
| | | VSRISVAGRRTSYADSVKGRFTISRDNSKNTLYLQMNSLRAEDTAVYYC |
| | | AKRANSRRGFDYWGQGTLVTVSS |
| TSLP-166 | 166 | EVQLLESGGGLVQPGGSLRLSCAASGFTFSPRRMSWVRQAPGKGLEWV |
| | | SAISGNGGSTFYADSVKGRFTISRDNSKNTLYLQMNSLRAEDTAVYYCA |
| | | RGRLFDYWGQGTLVTVSS |
| TSLP-167 | 167 | EVQLLESGGGLVQPGGSLRLSCAASGFTFAHEPMVWVRQAPGKGLEWV |
| | | SRISVAGRRTAYADSVKGRFTISRDNSKNTLYLQMNSLRAEDTAVYYCA |
| | | KSIKPFDYWGQGTLVTVSS |
| TSLP-168 | 168 | EVQLLESGGGLVQPGGSLRLSCAASGFTFGQESMYWVRQAPGKGLEWV |
| | | SRISVAGRRTAYADSVKGRFTISRDNSKNTLYLQMNSLRAEDTAVYYCA |
| | | KRGKQFDYWGQGTLVTVSS |
| TSLP-169 | 169 | EVQLLESGGGLVQPGGSLRLSCAASGFTFGSSAMSWVRQAPGKGLEWV |
| | | SEIRVGGGDTYYADSVKGRFTISRDNSKNTLYLQMNSLRAEDTAVYYCA |
| | | KGLRRFDYWGQGTLVTVSS |
| TSLP-170 | 170 | EVQLLESGGGLVQPGGSLRLSCAASGFTFNKYPMMWVRQAPGKGLEW |
| | | VSRISVAGRRTAYADSVKGRFTISRDNSKNTLYLQMNSLRAEDTAVYYC |
| | | AKAGSGFDYWGQGTLVTVSS |
| TSLP-171 | 171 | EVQLLESGGGLVQPGGSLRLSCAASGFTFNKYPMMWVRQAPGKGLEW |
| | | VSRISVAGRRTAYADSVKGRFTISRDNSKNTLYLQMNSLRAEDTAVYYC |
| | | ARGRLFDYWGQGTLVTVSS |
| TSLP-172 | 172 | EVQLLESGGGLVQPGGSLRLSCAASGFTFGAYPMYWVRQAPGKGLEWV |
| | | SRISVAGRRTAYADSVKGRFTISRDNSKNTLYLQMNSLRAEDTAVYYCA |
| | | KRGKQFDYWGQGTLVTVSS |
| TSLP-173 | 173 | EVQLLESGGGLVQPGGSLRLSCAASGFTFNHYGMGWVRQAPGKGLEW |
| | | VSQISETGRRTYYADSVKGRFTISRDNSKNTLYLQMNSLRAEDTAVYYC |
| | | ARVWRNHLDYWGQGTLVTVSS |
| TSLP-174 | 174 | EVQLLESGGGLVQPGGSLRLSCAASGFTFSNYGVSWVRQAPGKGLEWV |
| | | STISHGGEHTYYADSVKGRFTISRDNSKNTLYLQMNSLRAEDTAVYYCA |
| | | KGARRFDYWGQGTLVTVSS |
| TSLP-175 | 175 | EVQLLESGGGLVQPGGSLRLSCAASGFTFDRYRMMWVRQAPGKGLEW |
| | | VSAISGRGDNTYYADSVKGRFTISRDNSKNTLYLQMNSLRAEDTAVYYC |
| | | ARGRLFDYWGQGTLVTVSS |
| TSLP-176 | 176 | EVQLLESGGGLVQPGGSLRLSCAASGFTFDRYRMMWVRQAPGKGLEW |
| | | VSWISPHGALTYYADSVKGRFTISRDNSKNTLYLQMNSLRAEDTAVYYC |
| | | ARGPYGRYAALDYWGQGTLVTVSS |
| TSLP-177 | 177 | EVQLLESGGGLVQPGGSLRLSCAASGFTFRRYVMGWVRQAPGKGLEWV |
| | | SSISGYGSTTYYADSVKGRFTISRDNSKNTLYLQMNSLRAEDTAVYYCA |
| | | RGRLFDYWGQGTLVTVSS |
| TSLP-178 | 178 | EVQLLESGGGLVQPGGSLRLSCAASGFTFGNYRMTWVRQAPGKGLEWV |
| | | SEISPSGKKKYYADSVKGRFTISRDNSKNTLYLQMNSLRAEDTAVYYCA |
| | | KSPYNWNPFDYWGQGTLVTVSS |
| TSLP-179 | 179 | EVQLLESGGGLVQPGGSLRLSCAASGFTFAKYPMMWVRQAPGKGLEW |
| | | VSAITGSGGSTYYADSVKGRFTISRDNSKNTLYLQMNSLRAEDTAVYYC |
| | | AKQIPGRKWTANGRKDYWGQGTLVTVSS |
| TSLP-180 | 180 | EVQLLESGGGLVQPGGSLRLSCAASGFTFGNYRMTWVRQAPGKGLEWV |
| | | SAITGSGGSTYYADSVKGRFTISRDNSKNTLYLQMNSLRAEDTAVYYCA |
| | | RGRLFDYWGQGTLVTVSS |
| TSLP-181 | 181 | EVQLLESGGGLVQPGGSLRLSCAASGFTFGNYRMTWVRQAPGKGLEWV |
| | | SAISREGRATYYADSVKGRFTISRDNSKNTLYLQMNSLRAEDTAVYYCA |
| | | REWQHGPLAYWGQGTLVTVSS |
| TSLP-182 | 182 | EVQLLESGGGLVQPGGSLRLSCAASGFTFDRYRMTWVRQAPGKGLEWV |
| | | SAISGRGDNTYYADSVKGRFTISRDNSKNTLYLQMNSLRAEDTAVYYCA |
| | | RGRLFDYWGQGTLVTVSS |
| TSLP-183 | 183 | EVQLLESGGGLVQPGGSLRLSCAASGFTFAKYKMWWVRQAPGKGLEW |
| | | VSAISREGRATYYADSVKGRFTISRDNSKNTLYLQMNSLRAEDTAVYYC |
| | | ARQRSYSRYDIRTPQTYDYWGQGTLVTVSS |
| TSLP-184 | 184 | EVQLLESGGGLVQPGGSLRLSCAASGFTFGQESMYWVRQAPGKGLEWV |
| | | SRISVAGRRTAYADSVKGRFTISRDNSKNTLYLQMNSLRAEDTAVYYCA |
| | | KRGKQFDYWGQGTLVTVSS |
| TSLP-185 | 185 | EVQLLESGGGLVQPGGSLRLSCAASGFTFDRYRMMWVRQAPGKGLEW |
| | | VSDIGASGSATSYADSVKGRFTISRDNSKNTLYLQMNSLRAEDTAVYYC |
| | | AKPGHRFDYWGQGTLVTVSS |
| TSLP-186 | 186 | EVQLLESGGGLVQPGGSLRLSCAASGFTFGAYPMYWVRQAPGKGLEWV |
| | | SRISVAGRRTAYADSVKGRFTISRDNSKNTLYLQMNSLRAEDTAVYYCA |
| | | KSRTGRYFDYWGQGTLVTVSS |
| TSLP-187 | 187 | EVQLLESGGGLVQPGGSLRLSCAASGFTFDRYRMMWVRQAPGKGLEW |
| | | VSAISGNGGSTFYADSVKGRFTISRDNSKNTLYLQMNSLRAEDTAVYYC |
| | | ARGRLFDYWGQGTLVTVSS |
| TSLP-188 | 188 | EVQLLESGGGLVQPGGSLRLSCAASGFTFNKYPMMWVRQAPGKGLEW |
| | | VSRISVAGRRTAYADSVKGRFTISRDNSKNTLYLQMNSLRAEDTAVYYC |
| | | AKSIKPFDYWGQGTLVTVSS |
| TSLP-189 | 189 | EVQLLESGGGLVQPGGSLRLSCTASGFTFSYYRMYWVRQAPGKGLEWV |
| | | SAISREGRATYYADSVKGRFTISRDNSKNTLYLQMNSLRAEDTAVYYCA |
| | | KRANSRRGFDYWGQGTLVTVSS |
| TSLP-190 | 190 | EVQLLESGGGLVQPGGSLRLSCAASGFTFGQESMYWVRQAPGKGLEWV |
| | | SRISVAGRRTAYADSVKGRFTISRDNSKNTLYLQMNSLRAEDTAVYYCA |
| | | KRGKQFDYWGQGTLVTVSS |
| TSLP-191 | 191 | EVQLLESGGGLVQPGGSLRLSCAASGFTFGNYAMAWVRQAPGKGLEW |
| | | VSRISVAGRRTAYADSVKGRFTISRDNSKNTLYLQMNSLRAEDTAVYYC |
| | | ARGYRGYFDYWGQGTLVTVSS |
| TSLP-192 | 192 | EVQLLESGGGLVQPGGSLRLSCAASGFTFSKYQMTWVRQAPGKGLEWV |
| | | SAISGSGGNTYYADSVKGRFTISRDNSKNTLYLQMNSLRAEDTAVYYCA |
| | | RGRLFDYWGQGTLVTVSS |
| TSLP-193 | 193 | EVQLLESGGGLVQPGGSLRLSCAASGFTFEQTDMHWVRQAPGKGLEWV |
| | | SRISVAGRRTAYADSVKGRFTISRDNSKNTLYLQMNSLRAEDTAVYYCA |
| | | KDKRYRGSQHYFDYWGQGTLVTVSS |
| TSLP-194 | 194 | EVQLLESGGGLVQPGGSLRLSCAASGFTFADEGMMWVRQAPGKGLEW |
| | | VSRISVAGRRTTYADSVKGRFTISRDNSKNTLYLQMNSLRAEDTAVYYC |
| | | AKFPSTHGKFDYWGQGTLVTVSS |
| TSLP-195 | 195 | EVQLLESGGGLVQPGGSLRLSCAASGFTFGAYPMYWVRQAPGKGLEWV |
| | | SRISVAGRRTAYADSVKGRFTISRDNSKNTLYLQMNSLRAEDTAVYYCA |
| | | KYFHGKFDYWGQGTLVTVSS |
| TSLP-196 | 196 | EVQLLESGGGLVQPGGSLRLSCAASGFTFDRYRMMWVRQAPGKGLEW |
| | | VSAITGSGGSTYYADSVKGRFTISRDNSKNTLYLQMNSLRAEDTAVYYC |
| | | ARGRLFDYWGQGTLVTVSS |
| TSLP-197 | 197 | EVQLLESGGGLVQPGGSLRLSCAASGFTFSRYFMGWVRQAPGKGLEWV |
| | | SSISGSSGTTYYADSVKGRFTISRDNSKNTLYLQMNSLRAEDTAVYYCA |
| | | KAGRKFDYWGQGTLVTVSS |
| TSLP-198 | 198 | EVQLLESGGGLVQPGGSLRLSCAASGFTFSKYQMTWVRQAPGKGLEWV |
| | | SAISGNGGSTFYADSVKGRFTISRDNSKNTLYLQMNSLRAEDTAVYYCA |
| | | KGRRRFDYWGQGTLVTVSS |
| TSLP-199 | 199 | EVQLLESGGGLVQPGGSLRLSCAASGFTFSRYGMHWVRQAPGKGLEWV |
| | | SVISGSGGRPNYADSVKGRFTISRDNSKNTLYLQMNSLRAEDTAVYYCA |
| | | RGYRGYFDYWGQGTLVTVSS |
| TSLP-200 | 200 | EVQLLESGGGLVQPGGSLRLSCAASGFTFGAYPMYWVRQAPGKGLEWV |
| | | SRISVAGRRTAYADSVKGRFTISRDNSKNTLYLQMNSLRAEDTAVYYCA |
| | | KRSRLFDYWGQGTLVTVSS |
| TSLP-201 | 201 | EVQLLESGGGLVQPGGSLRLSCAASGFTFDRYRMMWVRQAPGKGLEW |
| | | VSAISGSGDKTYYADSVKGRFTISRDNSKNTLYLQMNSLRAEDTAVYYC |
| | | AKSGRRFDYWGQGTLVTVSS |
| TSLP-202 | 202 | EVQLLESGGGLVQPGGSLRLSCAASGFTFSRYRMTWVRQAPGKGLEWV |
| | | SAISGRGDNTYYADSVKGRFTISRDNSKNTLYLQMNSLRAEDTAVYYCA |
| | | KSGRRFDYWGQGTLVTVSS |
| TSLP-203 | 203 | EVQLLESGGGLVQPGGSLRLSCAASGFTFGNYAMAWVRQAPGKGLEW |
| | | VSRISVAGRRTAYADSVKGRFTISRDNSKNTLYLQMNSLRAEDTAVYYC |
| | | ARVWRNHLDYWGQGTLVTVSS |
| TSLP-204 | 204 | EVQLLESGGGLVQPGGSLRLSCAASGFTFNKYPMMWVRQAPGKGLEW |
| | | VSRISVAGRRTAYADSVKGRFTISRDNSKNTLYLQMNSLRAEDTAVYYC |
| | | AKRGKQFDYWGQGTLVTVSS |
| TSLP-205 | 205 | EVQLLESGGGLVQPGGSLRLSCAASGLTFPNYGMGWVRQAPGKGLEWV |
| | | GKINYAGNTDYNDSVKGRFTISRDNSKNTLYLQMNSLRAEDTAVYYCA |
| | | KRTRSKFDYWGQGTLVTVSS |
| TSLP-206 | 206 | EVQLLESGGGLVQPGGSLRLSCAASGFTFDRYRMMWVRQAPGKGLEW |
| | | VSRISVAGRRTAYADSVKGRFTISRDNSKNTLYLQMNSLRAEDTAVYYC |
| | | AKPGRLFDYWGQGTLVTVSS |
| TSLP-207 | 207 | EVQLLESGGGLVQPGGSLRLSCAASGFTFGNYRMTWVRQAPGKGLEWV |
| | | SAISREGRATYYADSVKGRFTISRDNSKNTLYLQMNSLRAEDTAVYYCA |
| | | RQRSYSRYDIRTPQTYDYWGQGTLVTVSS |
| TSLP-208 | 208 | EVQLLESGGGLVQPGGSLRLSCAASGFTFNKYPMMWVRQAPGKGLEW |
| | | VSRISVAGRRTAYADSVKGRFTISRDNSKNTLYLQMNSLRAEDTAVYYC |
| | | AKAGSGFDYWGQGTLVTVSS |
| TSLP-209 | 209 | EVQLLESGGGLVQPGGSLRLSCAASGFTFDRYRMMWVRQAPGKGLEW |
| | | VSAISGSGDKTYYADSVKGRFTISRDNSKNTLYLQMNSLRAEDTAVYYC |
| | | ARGRLFDYWGQGTLVTVSS |
| TSLP-210 | 210 | EVQLLESGGGLVQPGGSLRLSCAASGFTFDRYRMMWVRQAPGKGLEW |
| | | VSAISGNGGSTFYADSVKGRFTISRDNSKNTLYLQMNSLRAEDTAVYYC |
| | | ARGRLFDYWGQGTLVTVSS |
| TSLP-211 | 211 | EVQLLESGGGLVQPGGSLRLSCAASGFTFNHYGMGWVRQAPGKGLEW |
| | | VSAISREGRATYYADSVKGRFTISRDNSKNTLYLQMNSLRAEDTAVYYC |
| | | AKRANSRRGFDYWGQGTLVTVSS |
| TSLP-212 | 212 | EVQLLESGGGLVQPGGSLRLSCAASGLTFPNYGMGWVRQAPGKGLEWV |
| | | SEISPSGKKKYYADSVKGRFTISRDNSKNTLYLQMNSLRAEDTAVYYCA |
| | | KRTRSKFDYWGQGTLVTVSS |
| TSLP-213 | 213 | EVQLLESGGGLVQPGGSLRLSCAASGFTFAKYKMWWVRQAPGKGLEW |
| | | VSAISGNGGSTFYADSVKGRFTISRDNSKNTLYLQMNSLRAEDTAVYYC |
| | | ARGRLFDYWGQGTLVTVSS |
| TSLP-214 | 214 | EVQLLESGGGLVQPGGSLRLSCAASGFTFDRYRMMWVRQAPGKGLEW |
| | | VSAITGSGGSTYYADSVKGRFTISRDNSKNTLYLQMNSLRAEDTAVYYC |
| | | ARGRLFDYWGQGTLVTVSS |
| TSLP-215 | 215 | EVQLLESGGGLVQPGGSLRLSCAASGFTFSRYTMNWVRQAPGKGLEWV |
| | | SAISGSGARTYYADSVKGRFTISRDNSKNTLYLQMNSLRAEDTAVYYCA |
| | | RGWSSHWFDPWGQGTLVTVSS |
| TSLP-216 | 216 | EVQLLESGGGLVQPGGSLRLSCAASGFTFGRYAMSWVRQAPGKGLEWV |
| | | SSVSGSGGSTYYADSVKGRFTISRDNSKNTLYLQMNSLRAEDTAVYYCA |
| | | RSRGRGAWFDHWGQGTLVTVSS |
| TSLP-217 | 217 | EVQLLESGGGLVQPGGSLRLSCAASGFTFSNYAMAWVRQAPGKGLEWV |
| | | SAISGSAGRTYYADSVKGRFTISRDNSKNTLYLQMNSLRAEDTAVYYCA |
| | | RRARRSGWYGALDYWGQGTLVTVSS |
| TSLP-218 | 218 | EVQLLESGGGLVQPGGSLRLSCAASGFSFSSYAMNWVRQAPGKGLEWV |
| | | SAISGSGGKTYYADSVKGRFTISRDNSKNTLYLQMNSLRAEDTAVYYCA |
| | | RWGGYAKRAFDFWGQGTLVTVSS |
| TSLP-219 | 219 | EVQLLESGGGLVQPGGSLRLSCAASGLTFNNYAMSWVRQAPGKGLEWV |
| | | SLISGSGGRTYYADSVKGRFTISRDNSKNTLYLQMNSLRAEDTAVYYCA |
| | | KLMYRAYGPADYWGQGTLVTVSS |
| TSLP-220 | 220 | EVQLLESGGGLVQPGGSLRLSCAASGFTFNRYAMSWVRQAPGKGLEWV |
| | | SSISVSGGTTYYADSVKGRFTISRDNSKNTLYLQMNSLRAEDTAVYYCA |
| | | RGGRWRGFGNWGQGTLVTVSS |
| TSLP-221 | 221 | EVQLLESGGGLVQPGGSLRLSCAASGFTFSTYTMTWVRQAPGKGLEWV |
| | | SSISGGGGRTYYAESVKGRFTISRDNSKNTLYLQMNSLRAEDTAVYYCA |
| | | RYRLRPRDWDSWGQGTLVTVSS |
| TSLP-222 | 222 | EVQLLESGGGLVQPGGSLRLSCAASGFTFSRYGMSWVRQAPGKGLEWV |
| | | SAISGSGRSTYYADSVKGRFTISRDNSKNTLYLQMNSLRAEDTAVYYCA |
| | | RGRTGGSYYFDYWGQGTLVTVSS |
| TSLP-223 | 223 | EVQLLESGGGLVQPGGSLRLSCAASGFTFSKYAMGWVRQAPGKGLEWV |
| | | SAISGSGGRTHYADSVKGRFTISRDNSKNTLYLQMNSLRAEDTAVYYCA |
| | | RGARALPYWGQGTLVTVSS |
| TSLP-224 | 224 | EVQLLESGGGLVQPGGSLRLSCAASGFTFRRSAMSWVRQAPGKGLEWV |
| | | SGISGSGGSTYYADSVKGRFTISRDNSKNTLYLQMNSLRAEDTAVYYCA |
| | | RKRGRAFDIWGQGTLVTVSS |
| TSLP-225 | 225 | EVQLLESGGGLVQPGGSLRLSCAASGFSFSSFAMAWVRQAPGKGLEWV |
| | | SAISGRGGNTYYADSVKGRFTISRDNSKNTLYLQMNSLRAEDTAVYYCA |
| | | RRVIRYHSSGYYYKGFDSWGQGTLVTVSS |
| TSLP-226 | 226 | EVQLLESGGGLVQPGGSLRLSCAASGFTFSHYAMSWVRQAPGKGLEWV |
| | | SAISGSGRRTYYADSVKGRFTISRDNSKNTLYLQMNSLRAEDTAVYYCA |
| | | RGRSLAYWGQGTLVTVSS |
| TSLP-227 | 227 | EVQLLESGEGLVQPGWSLRLSCAASGFTFRSYGMSWVRQAPGKGLEWV |
| | | SSISGSGVDTYYADSVKGRFTISRDNSKNTLYLQMNSLRAEDTAVYYCA |
| | | KAAWGVPTTVFDSWGQGTLVTVSS |
| TSLP-228 | 228 | EVQLLESGGGLVQPGGSLRLSCAASGFSFSSYSMSWVRQAPGKGLEWVS |
| | | GISGRGGSTYYADSVKGRFTISRDNSKNTLYLQMNSLRAEDTAVYYCAR |
| | | VKTVTSLAMDVWGQGTLVTVSS |
| TSLP-229 | 229 | EVQLLESGGGLVQPGGSLRLSCAASGLTFNNYAMSWVRQAPGKGLEWV |
| | | SLISGSGGRTYYADSVKGRFTISRDNSKNTLYLQMNSLRAEDTAVYYCA |
| | | KLMYRAYGPADYWGQGTLVTVSS |
| TSLP-230 | 230 | EVQLLESGGGLVQPGGSLRLSCAASGFTFSRYGMSWVRQAPGKGLEWV |
| | | STISGSGYSTYYADSVKGRFTISRDNSKNTLYLQMNSLRAEDTAVYYCA |
| | | RRRKLGGTSTWYFDLWGQGTLVTVSS |
| TSLP-231 | 231 | EVQLLESGGGLVQPGGSLRLSCAASGFTFSRYAMNWVRQAPGKGLEWV |
| | | SSISGRGGNTYYADSVKGRFTISRDNSKNTLYLQMNSLRAEDTAVYYCA |
| | | RGRSGYTSWGQGTLVTVSS |
| TSLP-232 | 232 | EVQLLESGGGLVQPGGSLRLSCAASGFTFSKFAMTWVRQAPGKGLEWV |
| | | STISGGGGRTYYADSVKGRFTISRDNSKNTLYLQMNSLRAEDTAVYYCA |
| | | RHLTVTTRNGMAVWGQGTLVTVSS |
| TSLP-233 | 233 | EVQLLESGGGLVQPGGSLRLSCAASGFTFSRYTMNWVRQAPGKGLEWV |
| | | SAISGSCARTYYADSVKGRFTISRDNSKNTLYLQMNSLRAEDTAVYYCA |
| | | RGWSSHWFDPWGQGTLVTVSS |
| TSLP-234 | 234 | EVQLLESGGGLVQPGGSLRLSCAASGFTFSKYAMGWVRQAPGKGLEWV |
| | | SAISGSGGRTHYADSVKGRFTISRDNSKNTLYLQMNSLRAEDTAVYYCA |
| | | RGARALPYWGQGTLVTVSS |
| TSLP-235 | 235 | EVQLLESGGGLVQPGGSLRLSCAASGFSFSGYAMTWVRQAPGKGLEWV |
| | | SAISGTGVSTYYADSVKGRFTISRDNSKNTLYLQMNSLRAEDTAVYYCA |
| | | RSKRVLRKQLRRYYYSYGMDVWGQGTLVTVSS |
| TSLP-236 | 236 | EVQLLESGGGLVQPGGSLRLSCAASGFTFRRYAMSWVRQAPGKGLEWV |
| | | SGISASGGRTYYADSVKGRFTISRDNSKNTLYLQMNSLRAEDTAVYYCA |
| | | RRLGGRSGALESWGQGTLVTVSS |
| TSLP-237 | 237 | EVQLLESGGGLVQPGGSLRLSCAASGFSFSSYAMNWVRQAPGKGLEWV |
| | | SAISGSGGKTYYADSVKGRFTISRDNSKNTLYLQMNSLRAEDTAVYYCA |
| | | RWGGYAKRAFDFWGQGTLVTVSS |
| TSLP-238 | 238 | EVQLLESGGGLVQPGGSLRLSCAASGFTFNRYAMSWVRQAPGKGLEWV |
| | | SSISVSGGTTYYADSVKGRFTISRDNSKNTLYLQMNSLRAEDTAVYYCA |
| | | RGGRWRGFGNWGQGTLVTVSS |
| TSLP-239 | 239 | EVQLLESGGGLVQPGGSLRLSCAASGFTFSSYAMTWVRQAPGKGLEWV |
| | | SGISGSGTTTYYADSVKGRFTISRDNSKNTLYLQMNSLRAEDTAVYYCA |
| | | RLFGSGNRKAFDFWGQGTLVTVSS |
| TSLP-240 | 240 | EVQLLESGGGLVQPGGSLRLSCAASGFTFGNFAMSWVRQAPGKGLEWV |
| | | SAISGRGGSTYYADSVKGRFTISRDNSKNTLYLQMNSLRAEDTAVYYCA |
| | | RRQHFRAAVRGRAFDYWGQGTLVTVSS |
| TSLP-241 | 241 | EVQLLESGGGLVQPGGSLRLSCAASGFMFSHYAMSWVRQAPGKGLEW |
| | | VSAVSGSGISTYYADSVKGRFTISRDNSKNTLYLQMNSLRAEDTAVYYC |
| | | AGDIDYWGQGTLVTVSS |
| TSLP-242 | 242 | EVQLLESGGGLVQPGGSLRLSCAASGFTFSRYGMSWVRQAPGKGLEWV |
| | | SAISGSGRSTYYADSVKGRFTISRDNSKNTLYLQMNSLRAEDTAVYYCA |
| | | RGRTGGSYYFDYWGQGTLVTVSS |
| TSLP-243 | 243 | EVQLLESGGGLVQPGGSLRLSCAASGFTFRSYVMTWVRQAPGKGLEWV |
| | | SSIGGSGGTTYYADSVKGRFTISRDNSKNTLYLQMNSLRAEDTAVYYCA |
| | | RVHRKMNYGTDSWGQGTLVTVSS |
| TSLP-244 | 244 | EVQLLESGGGLVQPGGSLRLSCAASGFTFGRYAMSWVRQAPGKGLEWV |
| | | SAISGSGADTYYADSVKGRFTISRDNSKNTLYLQMNSLRAEDTAVYYCA |
| | | RDRGDFWRRFDPWGQGTLVTVSS |
| TSLP-245 | 245 | EVQLLESGGGLVQPGGSLRLSCAASGFTFRRYAMSWVRQAPGKGLEWV |
| | | AAISGSGGTTYYADSVKGRFTISRDNSKNTLYLQMNSLRAEDTAVYYCA |
| | | RGLRWRRYFDRWGQGTLVTVSS |
| TSLP-246 | 246 | EVQLLESGGGLVQPGGSLRLSCAASGFTFSRYGMTWVRQAPGKGLEWV |
| | | SAISGSGGRTYYADSVKGRFTISRDNSKNTLYLQMNSLRAEDTAVYYCA |
| | | RIYRGAFDYWGQGTLVTVSS |
| TSLP-247 | 247 | EVQLLESGGGLVQPGGSLRLSCAASGFTFSAYAMTWVRQAPGKGLEWV |
| | | STITGSGRSTYYADSVKGRFTISRDNSKNTLYLQMNSLRAEDTAVYYCA |
| | | RHRRLRALDSWGQGTLVTVSS |
| TSLP-248 | 248 | EVQLLESGGGLVQPGGSLRLSCAASGFTFRRSAMSWVRQAPGKGLEWV |
| | | SGISGSGGSTYYADSVKGRFTISRDNSKNTLYLQMNSLRAEDTAVYYCA |
| | | RKRGRAFDIWGQGTLVTVSS |
| TSLP-249 | 249 | EVQLLESGGGLVQPGGSLRLSCAASGFTFYSYAMSWVRQAPGKGLEWV |
| | | SAISGGGGNTYYADSVKGRFTISRDNSKNTLYLQMNSLRAEDTAVYYCA |
| | | RALLYYDYIWGTYRITTSKYYFDYWGQGTLVTVSS |
| TSLP-250 | 250 | EVQLLESGGGLVQPGGSLRLSCAASGFTFSRYTMNWVRQAPGKGLEWV |
| | | SSISGGGGRTYYAESVKGRFTISRDNSKNTLYLQMNSLRAEDTAVYYCA |
| | | RYRLRPRDWDSWGQGTLVTVSS |
| TSLP-251 | 251 | EVQLLESGGGLVQPGGSLRLSCAASGFTFSNYAMAWVRQAPGKGLEWV |
| | | SAISGSAGRTYYADSVKGRFTISRDNSKNTLYLQMNSLRAEDTAVYYCA |
| | | RRARRSGWYGALDYWGQGTLVTVSS |
| TSLP-252 | 252 | EVQLLESGGGLVQPGGSLRLSCAASGFTFRRSAMSWVRQAPGKGLEWV |
| | | SAIRGSGGNTYYADSVKGRFTISRDNSKNTLYLQMNSLRAEDTAVYYCA |
| | | RGRAVSDIWGQGTLVTVSS |
| TSLP-253 | 253 | EVQLSESGGGLVQPGGSLRLSCAASGFTFSSYAMSWVRQAPGKGLEWV |
| | | SAISGSGGSTYYADSVKGRFTISRDNSKNTLYLQMNSLRAEDTAVYYCA |
| | | RAWRYYGDSDYWGQGTLVTVSS |
| TSLP-254 | 254 | EVQLLESGGGLVKPGGSLRLSCAASGFSFSRYAMNWVRQAPGKGLEWV |
| | | SSISGSGGSTYYADSVKGRFTISRDNSKNTLYLQMNSLRAEDTAVYYCA |
| | | RGRVKFDPWGQGTLVTVSS |
| TSLP-255 | 255 | EVQLLESGGGLVQPGGSLRLSCAASGFTFSSYAMGWVRQAPGKGLEWV |
| | | STISGSGGSAFYADSVKGRFTISRDNSKNTLYLQMNSLRAEDTAVYYCA |
| | | REGTIFGVAYYYYYMDVWGQGTLVTVSS |
| TSLP-256 | 256 | EVQLLESGGGLVQPGGSLRLSCAASGFTFGRYAMSWVRQAPGKGLEWV |
| | | SSVSGSGGSTYYADSVKGRFTISRDNSKNTLYLQMNSLRAEDTAVYYCA |
| | | RSRGRGAWFDHWGQGTLVTVSS |
| TSLP-257 | 257 | EVQLLESGGGLVQPGGSLRLSCAASGFTFGHYAMGWARQAPGKGLEW |
| | | VSGISSSRGSTYYADSVKGRFTISRDNSKNTLYLQMNSLRAEDTAVYYCT |
| | | KGIHYGGIDYWGQGTLVTVSS |
| TSLP-258 | 258 | EVQLLESGGGLVQPGGSLRLSCAASGLTFSRYAMSWVRQAPGKGLEWV |
| | | SGISGSGATTYYADSVKGRFTISRDNSKNTLYLQMNSLRAEDTAVYYCG |
| | | RYSRGPRYFDYWGQGTLVTVSS |
| TSLP-259 | 259 | EVQLLESGGGLVQPGGSLRLSCAASGFSFSSYAMSWVPQAPGKGLEWVS |
| | | TISGSGTNTYYADSVKGRFTISRDNSKNTLYLQMNSLRAEDTAVYYCAR |
| | | DGDYVWGSYRFFDYWGQGTLVTVSS |
| TSLP-260 | 260 | EVQLLESGGGLVQPGGSLRLSCAASGFTFDTYAMSWVRQAPGKGLEWV |
| | | SVVTGSGSSTYYADSVKGRFTISRDNSKNTLYLQMNSLRAKDTAVYYCA |
| | | RGWSSHWFDPWGQGTLVTVSS |
| TSLP-261 | 261 | EVQLLESGGGLVQPGGSLRLSCAASGFNFRSYAMNWVRQAPGKGLEWV |
| | | SVISGGGGSAYYADSVKGRFTISRDNSKNTLYLQMNSLRAEDTAVYYCV |
| | | RVKTFRKVGGNLISTLRMRGRAFDLWGQGTLVTVSS |
| TSLP-262 | 262 | EVQLLESGGGLVQPGGSLRLSCAASGFTFGSYGMGWVRQAPGKGLEWV |
| | | SAISSSGTGTYYADSVKGRFTISRDNSKNTLYLQMNSLRAEDTAVYYCA |
| | | RGMATMVRLGMEYWGQGTLVTVSS |
| TSLP-263 | 263 | EVQLLESGGGLVQPGGSLRLSCAASGFTFNTFAMHWVRQAPGKGLEWV |
| | | SAITASGGSTYYADSVKGRFTISRDNSKNTLYLQMNSLRAEDTAVYYCA |
| | | RHTPSYYDSFDYFYGMDVWGQGTLVTVSS |
| TSLP-264 | 264 | EVQLLESGGGLVQPGGSLRLSCAASGFTFSTYALTWVRQAPGKGLEWVS |
| | | GLSGSGGSTYYADSVKGRFTISRDNSKNTLYLQMNSLRAEDTAVYYCAR |
| | | EVGAPGYFQHWGQGTLVTVSS |
| TSLP-265 | 265 | EVQLLESGGGLVQPGGSLRLSCAASGFTFSRYAMNWVRQAPGKGLEWV |
| | | SSISGRGGNTYYADSVKGRFTISRDNSKNTLYLQMNSLRAEDTAVYYCA |
| | | RGRSGYTSWGQGTLVTVSS |
| TSLP-266 | 266 | EVQLLESGGGLVQPGGSLRLSCAASGFTFGRYAMSWVRQAPGKGLEWV |
| | | STISGSGVTTYYADSVKGRFTISRDNSKNTLYLQMNSLRAEDTAVYYCA |
| | | RGRRSYRPFGVVPYIDVWGQGTLVTVSS |
| TSLP-267 | 267 | EVQLLESGGGLVQPGGSLRLSCAASGFMFSSYAMTWVRQAPGKGLEWV |
| | | SSISGSGGTTFYADSVKGRFTISRDSSKNTLYLQMNSLRAEDTAVYYCAR |
| | | VTRAFDIWGQGTLVTVSS |
| TSLP-268 | 268 | EVQLLESGGGLVQPGGSLRLSCAASGFTFISYAMSWVRQAPGKGLEWVS |
| | | AISGSGAKTYYADSVKGRFTISRDNSKNTLYLQMNSLRAEDTAVYYCAK |
| | | DSSDYGEFDYWGQGTLVTVSS |
| TSLP-269 | 269 | EVQLLESGGGLVQPGGSLRLSCAASGFTFNTYVMSWVRQAPGKGLEWV |
| | | SSISSSGGSTYYADSVKGRFTISRDNSKNTLYPQMNSLRAEDTAVYYCTT |
| | | ADYDILTGYYPIDYWGQGTLVTVSS |
| TSLP-270 | 270 | EVQLLESGGGLVQPGGSLRLSCAASGFSFSNYAMTWVRQAPGKGLEWV |
| | | SAISGRGGSTYYADSVKGRFIISRDNSKNTLYLQMNSLRAEDTAVYYCTR |
| | | TTPRYSSGLGYWGQGTLVTVSS |
| TSLP-271 | 271 | EVQLLESGGGLVQPGGSLRLSCAASGFTFRSSAMSWVRQAPGKGLEWV |
| | | SGISGSGGITYYADSVKGRFTISRDNSKNTLYLQMNSLRAEDTAVYYCA |
| | | RMSRSSRRGPFDYWGQGTLVTVSS |
| TSLP-272 | 272 | EVQLLESGGGLVQPGGSLRLSCAASGFTFSRYTMNWVRQAPGKGLEWV |
| | | SAISGSGARTYYADSVKGRFTISRDNSKNTLYLQMNSLRAEDTAVYYCA |
| | | RDGSDDFWSGYYWSQYYYMDVWGQGTLVTVSS |
| TSLP-273 | 273 | EVQLLESGGGLVQPGGSPRLSCAASGVTFSTYAMSWVRQAPGKGLEWV |
| | | STLSGSGGSTYYADSVKGRFTISRDNSKNTLYLQMNSLRAEDTAVYYCA |
| | | KDGSVAPAGPYGMDVWGQGTLVTVSS |
| TSLP-274 | 274 | EVQLLESGGGLVQPGGSLRLSCAASGFTFSGYAMNWVRQAPGKGLEWV |
| | | SGISGSGGDTYYADSVKGRFTISRDNSKNTLYLQMNSLRAEDTAVYYCA |
| | | RDGFGVYYGLDVWGQGTLVTVSS |
| TSLP-275 | 275 | EVQLLESGGGLVQPGGSLRLSCAASGFTFSRYAMSWVRQAPGKGLEWV |
| | | SGISASGGNTYYADSVKGRFTISRDNSKNTLYLQMNSLRAEDTAVYYCA |
| | | RGRRNGVGVWGQGTLVTVSS |
| TSLP-276 | 276 | EVQLLESGGGLVQPGGSLRLSCAASGFTFINFAMSWVRQAPGKGLEWVS |
| | | AISGGGTSTYYADSVKGRFTISRDNSKNTLYLQMNSLRAEDTAVYYCAS |
| | | GGYASAFDIWGQGTLVTVSS |
| TSLP-277 | 277 | EVQLLESGGGLVQPGGSLRLSCAASGFTFSAYAMNWVRQAPGKGLEWV |
| | | SVISGSGGSTHYADSVKGRFTISGDNSKNTLYLQMNSLRAEDTAVYYCA |
| | | RGLTIYDFWSPLSNWGQGTLVTVSS |
| TSLP-278 | 278 | EVQLLESGGGLVQPGGSLRLSCAASGFTFRSYPMSWVRQAPGKGLEWV |
| | | SVISGSGGKTYYADSVKGRFTISRDNSKNTLYLQMNSLRAEDTAVYYCA |
| | | RGRGTSSPLDYWGQGTLVTVSS |
| TSLP-279 | 279 | EVQLLESGGGLVQPGGSLRLSCAASGFTFSDYAMGWVRQAPGKGLEWV |
| | | STISGSGGTTFYADSVKGRFTISRDNSKNTLYLQMNSLRAEDTAVYYCA |
| | | RTYSSSWYGYFDYWGQGTLVTVSS |
| TSLP-280 | 280 | EVQLLESGGGLVQPGGSLRLSCAASGVTFSSYVMSWVRQAPGKGLEWV |
| | | STISDTGGSTYYADSVKGRLTISRDNSKNTLYLQMNSLRAEDTAVYYCA |
| | | RDGTIGLKYFHHWGQGTLVTVSS |
| TSLP-281 | 281 | EVQLLESGGGLVQPGGSLRLSCAASGLSYALSWVRQAPGKGLEWVSGIS |
| | | GSGSGTYYADSVKGRFTISRDNSKNTLYLQMNSLRAEDTAVYCCAREDS |
| | | SSSPPFDYWGQGTLVTVSS |
| TSLP-282 | 282 | EVQLLESGGGLVQPGGSLRPSCAASGFSFSNFAMSWVRQAPGKGLEWV |
| | | SGISGSGYSTYYADSVKGRFTISRDNSKNTLYLQMNSLRAEETAVYYCA |
| | | TDRPSSYYDSGPIWGQGTLVTVSS |
| TSLP-283 | 283 | EVQLLESGGGLVQPGGSLRLSCAASGFTFSTYTMTWVRQAPGKGLEWV |
| | | SSISGGGGRTYYAESVKGRFTISRDNSKNTLYLQMNSLRAEDTAVYYCA |
| | | RGWSSHWFDPWGQGTLVTVSS |
| TSLP-284 | 284 | EVQLLESGGGLVQPGGSLRLSCAASGFTFSNFAMGWVRQAPGKGLSGS |
| | | AISGSGGSTYYTDSVKGRFTISRDNSKNTLYLQMNSLRAEDTAVYYCAR |
| | | DGITGRQHFDYWGQGTLVTVSS |
| TSLP-285 | 285 | EVQLLESGGGLVQPGGSLRLSCAASGFTFGDYGMGWVRQAPGKGLEW |
| | | VSGISGSGGDTYYTDSVKGRFTISRDNSKNTLYLQMNSLRAEDTAVYYC |
| | | AKDTSLRKWGQGTLVTVSS |
| TSLP-286 | 286 | EVQLLESGGGLVQPGGSLRLSCAASGFTFSGSAMSWVRQAPGKGLEWV |
| | | SAISGGGTSTYYADSVKGRFTISRDNSKNTLYLQMNSLRAEDTAVYYCV |
| | | RDCSSTSCSYAMDVWGQGTLVTVSS |
| TSLP-287 | 287 | EVQLLESGGGLVQPGGSLRLSCAASGFTFSRYTMNWVRQAPGKGLEWV |
| | | SAISGSGARTYYADSVKGRFTISRDNSKNTLYLQMNSLRAEDTAVYYCA |
| | | RQIPAFDIWGQGTLVTVSS |
| TSLP-288 | 288 | EVQLLESGGGLVQPGGSLRLSCAASGYTFSSYAMTWVRQAPGKGLEWV |
| | | STFGGSGGSTYYADSVKGRFTISRDNSKNTLYLQMNSLRAEDTAVYYCA |
| | | KADTAIESYYYYGMDVWGQGTLVTVSS |
| TSLP-289 | 289 | EVQLLESGGGLVQPGGSLRLSCAASGFTFGTYVMSWVRQAPGKGLEWV |
| | | SAISGSVGSTYYADSVKGRFTISRDNSKNTLYLQMNSLRAEDTAVYYCT |
| | | RGFASSWHDVFDYWGQGTLVTVSS |
| TSLP-290 | 290 | EVQLLESGGGLVQPGGSLRLSCAASGFTFSRYTMNWVRQAPGKGLEWV |
| | | SAISGSGARTYYADSVKGRFTISRDNSKNTLYLQMNSLRAEDTAVYYCA |
| | | RGLRRNKRGSYFDYWGQGTLVTVSS |
| TSLP-291 | 291 | EVQLLESGGGLVQPGGSLRLSCAASGFTFGRYAMSWVRQAPGKGLEWV |
| | | SAISGSGADTYYADSVKGRFTISRDNSKNTLYLQMNSLRAEDTAVYYCA |
| | | RDRGDFWRRFDPWGQGTLVTVSS |
| TSLP-292 | 292 | EVQLLESGGGLVQPGGSLRLSCAASGFSFSSFAMAWVRQAPGKGLEWV |
| | | AGISGSGGSTYYADSVKGRFTISRDNSKNTLYLQMNSLRAEDTAVYYCA |
| | | KDYDRYYYYYGMDVWGQGTLVTVSS |
| TSLP-293 | 293 | EVQLLESGGGLVQPGGSLRLSCAASGFTFSNHAMTWVRQAPGKGLEWV |
| | | SGVSSSGGSTYYADSVKGRFTISRDNSKNTLYLQMNSLRAEDTAVYYCA |
| | | RVRAAYSSSSDYWGQGTLVTVSS |
| TSLP-294 | 294 | EVQLLESGGGLVQPGGSLRLSCAASGISFSNYAMSWVRQAPGKGLEWV |
| | | SFTGGSTDYADSVKGRFTISRDNSKNTLYLQMNSLRAEDTAVYYCRSNY |
| | | YYGMDVWGQGTLVTVSS |
| TSLP-295 | 295 | EVQLLESGGGLVQPGGSLRLSCAASGFTFRRSAMSWVRQAPGKGLEWV |
| | | SGISGSGGSTYYADSVKGRFTISRDNSKNTLYLQMNSLRAEDTAVYYCA |
| | | RKRGRAFDIWGQGTLVTVSS |
| TSLP-296 | 296 | EVQLLESGGGLVQPGGSLRLSCAASGFTFSSHAMNWVRQAPGKGLEWV |
| | | SAISGSGGHTYYADSVKGRFTISRDNSKNTLYLQMNSLRAEDTAVYYCA |
| | | RLGNFDAFDIWGQGTLVTVSS |
| TSLP-297 | 297 | EVQLLESEGGLVQPGGSLRLSCAASGFTFSSSAMRWVRQAPGKGLEWVS |
| | | SISVRGGSTYYADSVKGRFTISRDNSKNTLYLQMNSLRAEDTAVYYCAR |
| | | DQQLLDYWGQGTLVTVSS |
| TSLP-298 | 298 | EVQLLESGGGLVQPGGSLRLSCAASGFPFSSYALSWVRQAPGKGLEWVS |
| | | VISVSGGSTYYADSVKVRFTISRDNSKNTLYLQMNSLRAEDTAVYYCTR |
| | | QFFPVLVPASNARYYYMDVWGQGTLVTVSS |
| TSLP-299 | 299 | EVQLLESGGGLVQPGGSLRLSCAASGFTFNDYAMTWVRQAPGKGLEWV |
| | | SSISGSGGTTYYADSVKGRFTISRDNSKNTLYLQMNSLRAEDTAVYYCA |
| | | RVSPYYYDSSGYYFDYWGQGTLVTVSS |
| TSLP-300 | 300 | EVQLLESGGGLVQPGGSLRLSCAASGFTFSSFATTWVRQAPGKGLEWVA |
| | | TISVGGGSTYYADSVKGRFTISRDNSKNTLYLQMNSLRAEDTAVYYCAR |
| | | EDDFWSAFHYYMDVWGQGTLVTVSS |
| TSLP-301 | 301 | EVQLLESGGGLVQPGGSLRLSCAASGFTFRTSAMSWVRQAPGKGLEWV |
| | | SGISGSGGRTYYADSVKGRFTISRDNSKNTLYLQMNSLRAEDTAVYYCA |
| | | RSAGYWGQGTLVTVSS |

TABLE 9
IL1RL1 Variable Heavy Chain Domain Sequences

| IL1RL1 | SEQ ID | |
|---|---|---|
| Variant | NO | VH Sequence |
| IL1RL1-1 | 302 | EVQLVESGGGLVQPGGSLRLSCAASGFTLDAWPMSWFRQAPGKEREVV |
| | | AVIYTSDGSTYYADSVKGRFTISADNSKNTAYLQMNSLKPEDTAVYYCA |
| | | ASKWYGGFGDTDIEWGQGTLVTVSS |
| IL1RL1-2 | 303 | EVQLVESGGGLVQPGGSLRLSCAASGGTFSAYAMGWFRQAPGKEREWV |
| | | ASISTSGSTITPYADSVKGRFTISADNSKNTAYLQMNSLKPEDTAVYYCA |
| | | AIAYEEGVYRWDWGQGTLVTVSS |
| IL1RL1-3 | 304 | EVQLVESGGGLVQPGGSLRLSCAASGRTFSMGWFRQAPGKEREWVSSIG |
| | | IAGTPTFYADSVKGRFTISADNSKNTAYLQMNSLKPEDTAVYYCASTDD |
| | | YGVDWGQGTLVTVSS |
| IL1RL1-4 | 305 | EVQLVESGGGLVQPGGSLRLSCAASGNAFRSTVMGWFRQAPGKEREFV |
| | | AVIIDSRTTKYADSVKGRFTISADNSKNTAYLQMNSLKPEDTAVYYCAA |
| | | VGGATTVTASEWDWGQGTLVTVSS |
| IL1RL1-5 | 306 | EVQLVESGGGLVQPGGSLRLSCAASGRTFSSIVMGWFRQAPGKEREMV |
| | | AVIIDSRTTKYADSVKGRFTISADNSKNTAYLQMNSLKPEDTAVYYCAA |
| | | VGGATTVTASEWDWGQGTLVTVSS |
| IL1RL1-6 | 307 | EVQLVESGGGLVQPGGSLRLSCAASGRTISTYGMGWFRQAPGKEREWV |
| | | SGINRDGSTYYADRVKGRFTISADNSKNTAYLQMNSLKPEDTAVYYCAL |
| | | RRLSPPPLLDWGQGTLVTVSS |
| IL1RL1-7 | 308 | EVQLVESGGGLVQPGGSLRLSCAASGRTSNIYAMGWFRQAPGKEREPV |
| | | ASITPGGRFPAYADSVKGRFTISADNSKNTAYLQMNSLKPEDTAVYYCS |
| | | TLYYSGLDPVDYWGQGTLVTVSS |
| IL1RL1-8 | 309 | EVQLVESGGGLVQPGGSLRLSCAASGRTSNIYAMGWFRQAPGKEREFV |
| | | ASLSASGSLTWYADSVKGRFTISADNSKNTAYLQMNSLKPEDTAVYYC |
| | | AANYGGSVLYNWGQGTLVTVSS |
| IL1RL1-9 | 310 | EVQLVESGGGLVQPGGSLRLSCAASGFIFSSYWMGWFRQAPGKEREFVA |
| | | TISWSGAYTEYADSVKGRFTISADNSKNTAYLQMNSLKPEDTAVYYCAA |
| | | ANEYWVYVNPNRYTWGQGTLVTVSS |
| IL1RL1-10 | 311 | EVQLVESGGGLVQPGGSLRLSCAASGRTSNIYAMGWFRQAPGKEREWV |
| | | ASISTSGSTITPYADSVKGRFTISADNSKNTAYLQMNSLKPEDTAVYYCA |
| | | AVYVSTWGNGYDWGQGTLVTVSS |
| IL1RL1-11 | 312 | EVQLVESGGGLVQPGGSLRLSCAASGRTFNWYAMGWFRQAPGKEREW |
| | | VSSIGIAGTPTFYADSVKGRFTISADNSKNTAYLQMNSLKPEDTAVYYCA |
| | | AVSSNSETFDWGQGTLVTVSS |
| IL1RL1-12 | 313 | EVQLVESGGGLVQPGGSLRLSCAASGSIFGLNAMGWFRQAPGKEREFVA |
| | | AISRFGSTDYADSVKGRFTISADNSKNTAYLQMNSLKPEDTAVYYCARS |
| | | YCTADSCYSSWFDPWGQGTLVTVSS |
| IL1RL1-13 | 314 | EVQLVESGGGLVQPGGSLRLSCAASGRTSSTATMGWFRQAPGKEREFV |
| | | GSIDWIPSNIYYADSVKGRFTISADNSKNTAYLQMNSLKPEDTAVYYCA |
| | | AWGQDGWDGDWGQGTLVTVSS |
| IL1RL1-14 | 315 | EVQLVESGGGLVQPGGSLRLSCAASGDISSIVAMGWFRQAPGKEREWVS |
| | | SIDTGGGSNIVYADSVKGRFTISADNSKNTAYLQMNSLKPEDTAVYYCA |
| | | AGLLDVQYVRQAAGYSWGQGTLVTVSS |
| IL1RL1-15 | 316 | EVQLVESGGGLVQPGGSLRLSCAASGRTYSISAMGWFRQAPGKEREWV |
| | | SSIGIAGTPTFYADSVKGRFTISADNSKNTAYLQMNSLKPEDTAVYYCAA |
| | | GVTGGAAYGWGQGTLVTVSS |
| IL1RL1-16 | 317 | EVQLVESGGGLVQPGGSLRLSCAASGFSLDYYGMGWFRQAPGKEREGV |
| | | ATINWSGATSYADSVKGRFTISADNSKNTAYLQMNSLKPEDTAVYYCAI |
| | | PGVWGQGTLVTVSS |
| IL1RL1-17 | 318 | EVQLVESGGGLVQPGGSLRLSCAASGRDLDYYAMGWFRQAPGKEREW |
| | | VSSIGIAGTPTFYADSVKGRFTISADNSKNTAYLQMNSLKPEDTAVYYCA |
| | | VVDLLRGKLWGQGTLVTVSS |
| IL1RL1-18 | 319 | EVQLVESGGGLVQPGGSLRLSCAASGVTLDLYAMGWFRQAPGKEREW |
| | | VASISTSGSTITPYADSVKGRFTISADNSKNTAYLQMNSLKPEDTAVYYC |
| | | AAIAHEEGVYRWDWGQGTLVTVSS |
| IL1RL1-19 | 320 | EVQLVESGGGLVQPGGSLRLSCAASGRTDSTASMGWFRQAPGKEREEV |
| | | AAISWSGGRTYYADSVKGRFTISADNSKNTAYLQMNSLKPEDTAVYYC |
| | | ARLAFQGNTVFDLWGQGTLVTVSS |
| IL1RL1-20 | 321 | EVQLVESGGGLVQPGGSLRLSCAASGFSLDDRVMGWFRQAPGKEREFV |
| | | AGITLGGSTSYADSVKGRFTISADNSKNTAYLQMNSLKPEDTAVYYCAA |
| | | APVPWGTRPSLLTYDWGQGTLVTVSS |
| IL1RL1-21 | 322 | EVQLVESGGGLVQPGGSLRLSCAASGTITSAVFMGWFRQAPGKEREFVA |
| | | GIIGSGGATYYADSVKGRFTISADNSKNTAYLQMNSLKPEDTAVYYCAA |
| | | SRYARERDVHAYDWGQGTLVTVSS |
| IL1RL1-22 | 323 | EVQLVESGGGLVQPGGSLRLSCAASGRTSNIYAMGWFRQAPGKEREWV |
| | | ASISTSGSTITPYADSVKGRFTISADNSKNTAYLQMNSLKPEDTAVYYCAI |
| | | AHGSSTYNWGQGTLVTVSS |
| IL1RL1-23 | 324 | EVQLVESGGGLVQPGGSLRLSCAASGRTFSTASMGWFRQAPGKEREWV |
| | | ASISTSGSTITPYADSVKGRFTISADNSKNTAYLQMNSLKPEDTAVYYCA |
| | | VVDLLRGKLWGQGTLVTVSS |
| IL1RL1-24 | 325 | EVQLVESGGGLVQPGGSLRLSCAASGGTAYAMGWFRQAPGKEREWVA |
| | | SISTSGSTITPYADSVKGRFTISADNSKNTAYLQMNSLKPEDTAVYYCAA |
| | | ASRSGSGYDWGQGTLVTVSS |
| IL1RL1-25 | 326 | EVQLVESGGGLVQPGGSLRLSCAASGGTFNGRAMGWFRQAPGKEREGV |
| | | ATINSGGGTNYADSVKGRFTISADNSKNTAYLQMNSLKPEDTAVYYCAL |
| | | RRLSPPPLLDWGQGTLVTVSS |
| IL1RL1-26 | 327 | EVQLVESGGGLVQPGGSLRLSCAASGLTTVYTMGWFRQAPGKERESVA |
| | | SISWTGGTTYYADSVKGRFTISADNSKNTAYLQMNSLKPEDTAVYYCAA |
| | | IAHEEGVYRWDWGQGTLVTVSS |
| IL1RL1-27 | 328 | EVQLVESGGGLVQPGGSLRLSCAASGGTISTYAIGWFRQAPGKEREGVA |
| | | AISPGNNTHYADSVKGRFTISADNSKNTAYLQMNSLKPEDTAVYYCAAR |
| | | PVRVDDISLPVGFDWGQGTLVTVSS |
| IL1RL1-28 | 329 | EVQLVESGGGLVQPGGSLRLSCAASGRTISRYTMGWFRQAPGKEREFVA |
| | | GIWSGGYTHYADSVKGRFTISADNSKNTAYLQMNSLKPEDTAVYYCAA |
| | | VSSNTEIFDWGQGTLVTVSS |
| IL1RL1-29 | 330 | EVQLVESGGGLVQPGGSLRLSCAASGGFSVYAMGWFRQAPGKEREWVS |
| | | STSTGGGGTYYADSVKGRFTISADNSKNTAYLQMNSLKPEDTAVYYCA |
| | | ANVGVTGSYEWGQGTLVTVSS |
| IL1RL1-30 | 331 | EVQLVESGGGLVQPGGSLRLSCAASGDISSIVAMGWFRQAPGKEREWV |
| | | ASISTSGSTITPYADSVKGRFTISADNSKNTAYLQMNSLKPEDTAVYYCA |
| | | AGAVRYGVSTSPMNYNWGQGTLVTVSS |
| IL1RL1-31 | 332 | EVQLVESGGGLVQPGGSLRLSCAASGFTFRNFGMGWFRQAPGKEREFV |
| | | ALINVGGVAKYADSVKGRFTISADNSKNTAYLQMNSLKPEDTAVYYCT |
| | | TDARHWGQGTLVTVSS |
| IL1RL1-32 | 333 | EVQLVESGGGLVQPGGSLRLSCAASGFTLGDYVMGWFRQAPGKEREFV |
| | | AVIYTSDGSTYYADSVKGRFTISADNSKNTAYLQMNSLKPEDTAVYYCV |
| | | VSFSTRGPYWGQGTLVTVSS |
| IL1RL1-33 | 334 | EVQLVESGGGLVQPGGSLRLSCAASGGTFSTHWMGWFRQAPGKEREEV |
| | | AAISWIIGSTYYADSVKGRFTISADNSKNTAYLQMNSLKPEDTAVYYCA |
| | | TSGSGSPNWGQGTLVTVSS |
| IL1RL1-34 | 335 | EVQLVESGGGLVQPGGSLRLSCAASGSTFSNAVMGWFRQAPGKEREFV |
| | | AVIIDSRTTKYADSVKGRFTISADNSKNTAYLQMNSLKPEDTAVYYCAA |
| | | VGGATTVTASEWDWGQGTLVTVSS |
| IL1RL1-35 | 336 | EVQLVESGGGLVQPGGSLRLSCAASGLTISSLTMGWFRQAPGKEREFVA |
| | | GIWSGGYTHYADSVKGRFTISADNSKNTAYLQMNSLKPEDTAVYYCAA |
| | | VSSNTEIFDWGQGTLVTVSS |
| IL1RL1-36 | 337 | EVQLVESGGGLVQPGGSLRLSCAASGSIYSLVAMGWFRQAPGKEREWM |
| | | GVIAYDGSTYYADSVKGRFTISADNSKNTAYLQMNSLKPEDTAVYYCA |
| | | AVGGATTVTASEWDWGQGTLVTVSS |
| IL1RL1-37 | 338 | EVQLVESGGGLVQPGGSLRLSCAASGGTFGSYAMGWFRQAPGKEREFV |
| | | AAINWSGARTYYADSVKGRFTISADNSKNTAYLQMNSLKPEDTAVYYC |
| | | AVSQPLNYYTYYDARRYDWGQGTLVTVSS |
| IL1RL1-38 | 339 | EVQLVESGGGLVQPGGSLRLSCAASGFTFSNHIMGWFRQAPGKERELVA |
| | | VIIDSRTTKYADSVKGRFTISADNSKNTAYLQMNSLKPEDTAVYYCAAV |
| | | GGATTVTASEWDWGQGTLVTVSS |
| IL1RL1-39 | 340 | EVQLVESGGGLVQPGGSLRLSCAASGGTFSVYAMGWFRQAPGKEREAV |
| | | ASISTSGGSTYYADSVKGRFTISADNSKNTAYLQMNSLKPEDTAVYYCAI |
| | | GGTLYDRRRFEWGQGTLVTVSS |
| IL1RL1-40 | 341 | EVQLVESGGGLVQPGGSLRLSCAASGRTFSDYVMGWFRQAPGKEREIV |
| | | AAIAWTGTTDYADSVKGRFTISADNSKNTAYLQMNSLKPEDTAVYYCA |
| | | ARIRGKVTVDNFDYAWGQGTLVTVSS |
| IL1RL1-41 | 342 | EVQLVESGGGLVQPGGSLRLSCAASGGTLSSYIMGWFRQAPGKEREGVA |
| | | AIDSDGSTSYADSVKGRFTISADNSKNTAYLQMNSLKPEDTAVYYCAAR |
| | | PVRVDDISLPVGFDWGQGTLVTVSS |
| IL1RL1-42 | 343 | EVQLVESGGGLVQPGGSLRLSCAASGFILDYYAMGWFRQAPGKEREWV |
| | | SSIGIAGTPTFYADSVKGRFTISADNSKNTAYLQMNSLKPEDTAVYYCAG |
| | | RLSNGLDWGQGTLVTVSS |
| IL1RL1-43 | 344 | EVQLVESGGGLVQPGGSLRLSCAASGRTYAMGWFRQAPGKEREWVASI |
| | | STSGSTITPYADSVKGRFTISADNSKNTAYLQMNSLKPEDTAVYYCAAN |
| | | VASGLKILQWGQGTLVTVSS |
| IL1RL1-44 | 345 | EVQLVESGGGLVQPGGSLRLSCAASGDYYAMGWFRQAPGKEREWVSSI |
| | | GIAGTPTFYADSVKGRFTISADNSKNTAYLQMNSLKPEDTAVYYCAANV |
| | | GVTGSYEWGQGTLVTVSS |
| IL1RL1-45 | 346 | EVQLVESGGGLVQPGGSLRLSCAASGRTLSSYTMGWFRQAPGKEREFV |
| | | AGIWSGGYTHYADSVKGRFTISADNSKNTAYLQMNSLKPEDTAVYYCA |
| | | AVSSNSETFDWGQGTLVTVSS |
| IL1RL1-46 | 347 | EVQLVESGGGLVQPGGSLRLSCAASGFTFSDIAMGWFRQAPGKEREFVA |
| | | AINWSGGSTKYADSVKGRFTISADNSKNTAYLQMNSLKPEDTAVYYCA |
| | | YSGIGTDWGQGTLVTVSS |
| IL1RL1-47 | 348 | EVQLVESGGGLVQPGGSLRLSCAASGRTFSMGWFRQAPGKEREWVASIS |
| | | TSGSTITPYADSVKGRFTISADNSKNTAYLQMNSLKPEDTAVYYCAAQG |
| | | SLYDDYDGLPIKYDWGQGTLVTVSS |
| IL1RL1-48 | 349 | EVQLVESGGGLVQPGGSLRLSCAASGTTFSSDVMGWFRQAPGKERELV |
| | | AVIIDSRTTKYADSVKGRFTISADNSKNTAYLQMNSLKPEDTAVYYCAA |
| | | VGGATTVTASEWDWGQGTLVTVSS |
| IL1RL1-49 | 350 | EVQLVESGGGLVQPGGSLRLSCAASGRTVTMGWFRQAPGKEREFVAGI |
| | | NWESGSTDYADSVKGRFTISADNSKNTAYLQMNSLKPEDTAVYYCAAL |
| | | ALGTDQSSTFDWGQGTLVTVSS |
| IL1RL1-50 | 351 | EVQLVESGGGLVQPGGSLRLSCAASGGTFNVYAMGWFRQAPGKEREW |
| | | VASISTSGSTITPYADSVKGRFTISADNSKNTAYLQMNSLKPEDTAVYYC |
| | | AAVYVSTWGNGYDWGQGTLVTVSS |
| IL1RL1-51 | 352 | EVQLVESGGGLVQPGGSLRLSCAASGVTLDLYAMGWFRQAPGKEREW |
| | | VSSIGIAGTPTFYADSVKGRFTISADNSKNTAYLQMNSLKPEDTAVYYCA |
| | | ANYGGSVLYNWGQGTLVTVSS |
| IL1RL1-52 | 353 | EVQLVESGGGLVQPGGSLRLSCAASGGTISTYAMGWFRQAPGKEREWV |
| | | ASISTSGSTITPYADSVKGRFTISADNSKNTAYLQMNSLKPEDTAVYYCA |
| | | AIAYEEGVYRWDWGQGTLVTVSS |
| IL1RL1-53 | 354 | EVQLVESGGGLVQPGGSLRLSCAASGRTPSIIAMGWFRQAPGKERELVA |
| | | VIIDSRTTKYADSVKGRFTISADNSKNTAYLQMNSLKPEDTAVYYCAAV |
| | | GGATTVTASEWDWGQGTLVTVSS |
| IL1RL1-54 | 355 | EVQLVESGGGLVQPGGSLRLSCAASGNIPPINAMGWFRQAPGKEREWV |
| | | ASISTSGSTITPYADSVKGRFTISADNSKNTAYLQMNSLKPEDTAVYYCA |
| | | ARSGWSGQYDWGQGTLVTVSS |
| IL1RL1-55 | 356 | EVQLVESGGGLVQPGGSLRLSCAASGEIASIIAMGWFRQAPGKERELVA |
| | | VIIGGGSTNYADSVKGRFTISADNSKNTAYLQMNSLKPEDTAVYYCAAV |
| | | GGATTVTASEWDWGQGTLVTVSS |
| IL1RL1-56 | 357 | EVQLVESGGGLVQPGGSLRLSCAASGFSLADYAMGWFRQAPGKEREGV |
| | | AAIYSDGGSADYADSVKGRFTISADNSKNTAYLQMNSLKPEDTAVYYC |
| | | AARPVRVDDISLPVGFDWGQGTLVTVSS |
| IL1RL1-57 | 358 | EVQLVESGGGLVQPGGSLRLSCAASGDIGSINSMGWFRQAPGKEREFLA |
| | | SVSWGFGSTYYADSVKGRFTISADNSKNTAYLQMNSLKPEDTAVYYCA |
| | | VNRLLYYSSGYYQTSVDWGQGTLVTVSS |
| IL1RL1-58 | 359 | EVQLVESGGGLVQPGGSLRLSCAASGFSFGDYAMGWFRQAPGKEREGV |
| | | AAITSGGRTNYADSVKGRFTISADNSKNTAYLQMNSLKPEDTAVYYCAG |
| | | RWDIVGAIWGQGTLVTVSS |
| IL1RL1-59 | 360 | EVQLVESGGGLVQPGGSLRLSCAASGGTAYAMGWFRQAPGKEREWVA |
| | | SISTSGSTITPYADSVKGRFTISADNSKNTAYLQMNSLKPEDTAVYYCAA |
| | | NVGVTGSYEWGQGTLVTVSS |
| IL1RL1-60 | 361 | EVQLVESGGGLVQPGGSLRLSCAASGGTISTYAMGWFRQAPGKEREFVA |
| | | AIRWSDGSSYYADSVKGRFTISADNSKNTAYLQMNSLKPEDTAVYYCA |
| | | VYDILTGYNGAFPIWGQGTLVTVSS |
| IL1RL1-61 | 362 | EVQLVESGGGLVQPGGSLRLSCAASGYTFRARAYVMGWFRQAPGKERE |
| | | LVASITSDDRTNYADSVKGRFTISADNSKNTAYLQMNSLKPEDTAVYYC |
| | | AGRWDIVGAIWGQGTLVTVSS |
| IL1RL1-62 | 363 | EVQLVESGGGLVQPGGSLRLSCAASGDIFTLASMGWFRQAPGKEREFVS |
| | | SINWSGTHTYYADSVKGRFTISADNSKNTAYLQMNSLKPEDTAVYYCAL |
| | | LDTARGVGWGQGTLVTVSS |
| IL1RL1-63 | 364 | EVQLVESGGGLVQPGGSLRLSCAASGRTLSSIYAMGWFRQAPGKEREGV |
| | | AAIYSGGITTYADSVKGRFTISADNSKNTAYLQMNSLKPEDTAVYYCAA |
| | | FDGYSGSDWGQGTLVTVSS |
| IL1RL1-64 | 365 | EVQLVESGGGLVQPGGSLRLSCAASGSIYSLVAMGWFRQAPGKEREMV |
| | | AVIIDSRTTKYADSVKGRFTISADNSKNTAYLQMNSLKPEDTAVYYCAA |
| | | VGGATTVTASEWDWGQGTLVTVSS |
| IL1RL1-65 | 366 | EVQLVESGGGLVQPGGSLRLSCAASGGTLDYYAMGWFRQAPGKEREW |
| | | VSSIGIAGTPTFYADSVKGRFTISADNSKNTAYLQMNSLKPEDTAVYYCA |
| | | ANRGLAGPAWGQGTLVTVSS |
| IL1RL1-66 | 367 | EVQLVESGGGLVQPGGSLRLSCAASGSIVAMGWFRQAPGKEREFVATIN |
| | | TAGWTTYADSVKGRFTISADNSKNTAYLQMNSLKPEDTAVYYCAAAPV |
| | | PWGTRPSLFTYDWGQGTLVTVSS |
| IL1RL1-67 | 368 | EVQLVESGGGLVQPGGSLRLSCAASGRAFSVYAMGWFRQAPGKEREGV |
| | | ASISTSGSTITPYADSVKGRFTISADNSKNTAYLQMNSLKPEDTAVYYCA |
| | | ALIKPSSTDRIFEEWGQGTLVTVSS |
| IL1RL1-68 | 369 | EVQLVESGGGLVQPGGSLRLSCAASGTIVNINVMGWFRQAPGKEREPVA |
| | | TITADGITNYADSVKGRFTISADNSKNTAYLQMNSLKPEDTAVYYCVRV |
| | | DWALNAAPLDNWGQGTLVTVSS |
| IL1RL1-69 | 370 | EVQLVESGGGLVQPGGSLRLSCAASGNIDRLYAMGWFRQAPGKEREWV |
| | | SSIGIAGTPTFYADSVKGRFTISADNSKNTAYLQMNSLKPEDTAVYYCAG |
| | | RWLEIGAEWGQGTLVTVSS |
| IL1RL1-70 | 371 | EVQLVESGGGLVQPGGSLRLSCAASGRTLSVYAMGWFRQAPGKEREWV |
| | | ASISTSGSTITPYADSVKGRFTISADNSKNTAYLQMNSLKPEDTAVYYCA |
| | | AIAYEEGVYRWDWGQGTLVTVSS |
| IL1RL1-71 | 372 | EVQLVESGGGLVQPGGSLRLSCAASGRTSNIYAMGWFRQAPGKEREWV |
| | | ASISTSGSTITPYADSVKGRFTISADNSKNTAYLQMNSLKPEDTAVYYCA |
| | | ANAESGPYTWGQGTLVTVSS |
| IL1RL1-72 | 373 | EVQLVESGGGLVQPGGSLRLSCAASGRPFSMYAMGWFRQAPGKEREFV |
| | | ASISWSGGHTFYADSVKGRFTISADNSKNTAYLQMNSLKPEDTAVYYCA |
| | | VSSGLVQRDWGQGTLVTVSS |
| IL1RL1-73 | 374 | EVQLVESGGGLVQPGGSLRLSCAASGDISSIVAMGWFRQAPGKEREWVS |
| | | SIGIAGTPTFYADSVKGRFTISADNSKNTAYLQMNSLKPEDTAVYYCAGR |
| | | SIGVDDMPYVWGQGTLVTVSS |
| IL1RL1-74 | 375 | EVQLVESGGGLVQPGGSLRLSCAASGFTFSSAIMGWFRQAPGKERELVA |
| | | VIIDSRTTKYADSVKGRFTISADNSKNTAYLQMNSLKPEDTAVYYCAAV |
| | | GGATTVTASEWDWGQGTLVTVSS |
| IL1RL1-75 | 376 | EVQLVESGGGLVQPGGSLRLSCAASGGTFSVYAMGWFRQAPGKEREWV |
| | | SSIGIAGTPTFYADSVKGRFTISADNSKNTAYLQMNSLKPEDTAVYYCAA |
| | | NVGVTGSYEWGQGTLVTVSS |
| IL1RL1-76 | 377 | EVQLVESGGGLVQPGGSLRLSCAASGSIFTIYAMGWFRQAPGKEREWVA |
| | | SISTSGSTITPYADSVKGRFTISADNSKNTAYLQMNSLKPEDTAVYYCAT |
| | | TEYSGYDAVNYWGQGTLVTVSS |
| IL1RL1-77 | 378 | EVQLVESGGGLVQPGGSLRLSCAASGRTFSSYVMGWFRQAPGKEREFV |
| | | AVIIDSRTTKYADSVKGRFTISADNSKNTAYLQMNSLKPEDTAVYYCAA |
| | | VGGATTVTASEWDWGQGTLVTVSS |
| IL1RL1-78 | 379 | EVQLVESGGGLVQPGGSLRLSCAASGFTLDDYAMGWFRQAPGKEREEV |
| | | AAISWIIGSTKYADSVKGRFTISADNSKNTAYLQMNSLKPEDTAVYYCA |
| | | AIVYEEGVYRWDWGQGTLVTVSS |
| IL1RL1-79 | 380 | EVQLVESGGGLVQPGGSLRLSCAASGRTFSMGWFRQAPGKEREAVASIS |
| | | WSGGSAFYADSVKGRFTISADNSKNTAYLQMNSLKPEDTAVYYCAAIG |
| | | GGAVWGQGTLVTVSS |
| IL1RL1-80 | 381 | EVQLVESGGGLVQPGGSLRLSCAASGRTFSPIAMGWFRQAPGKEREMV |
| | | AVIIDSRTTKYADSVKGRFTISADNSKNTAYLQMNSLKPEDTAVYYCAA |
| | | VGGATTVTASEWDWGQGTLVTVSS |
| IL1RL1-81 | 382 | EVQLVESGGGLVQPGGSLRLSCAASGVTLDLYAMGWFRQAPGKEREW |
| | | VASISTSGSTITPYADSVKGRFTISADNSKNTAYLQMNSLKPEDTAVYYC |
| | | AAIAYEEGVYRWDWGQGTLVTVSS |
| IL1RL1-82 | 383 | EVQLVESGGGLVQPGGSLRLSCAASGRTFSTLAMGWFRQAPGKEREWV |
| | | ASISTSGSTITPYADSVKGRFTISADNSKNTAYLQMNSLKPEDTAVYYCA |
| | | ALAYEEGVYRWDWGQGTLVTVSS |
| IL1RL1-83 | 384 | EVQLVESGGGLVQPGGSLRLSCAASGRSISDYTMGWFRQAPGKEREFVA |
| | | GIWSGGYTHYADSVKGRFTISADNSKNTAYLQMNSLKPEDTAVYYCAA |
| | | VSSNSETFDWGQGTLVTVSS |
| IL1RL1-84 | 385 | EVQLVESGGGLVQPGGSLRLSCAASGGIISNYHMGWFRQAPGKEREGVA |
| | | AIYSDGSTYYADRVKGRFTISADNSKNTAYLQMNSLKPEDTAVYYCAA |
| | | RPVRVDDISLPVGFDWGQGTLVTVSS |
| IL1RL1-85 | 386 | EVQLVESGGGLVQPGGSLRLSCAASGRTFSTAGMGWFRQAPGKEREWV |
| | | ASIITSGSTITPYADSVKGRFTISADNSKNTAYLQMNSLKPEDTAVYYCA |
| | | VVDLLRGKLWGQGTLVTVSS |
| IL1RL1-86 | 387 | EVQLVESGGGLVQPGGSLRLSCAASGGTFSTYAMGWFRQAPGKEREWV |
| | | ASISTSGSTITPYADSVKGRFTISADNSKNTAYLQMNSLKPEDTAVYYCA |
| | | AIAYEEGVYRWDWGQGTLVTVSS |
| IL1RL1-87 | 388 | EVQLVESGGGLVQPGGSLRLSCAASGGSFSVKDMGWFRQAPGKEREFV |
| | | SSISGGTTYADSVKGRFTISADNSKNTAYLQMNSLKPEDTAVYYCAAIA |
| | | YEEGVYRWDWGQGTLVTVSS |
| IL1RL1-88 | 389 | EVQLVESGGGLVQPGGSLRLSCAASGRTSHGYGGYGMGWFRQAPGKER |
| | | EEVAAISSSGSSTVYADSVKGRFTISADNSKNTAYLQMNSLKPEDTAVY |
| | | YCAAIAYEEGVYRWDWGQGTLVTVSS |
| IL1RL1-89 | 390 | EVQLVESGGGLVQPGGSLRLSCAASGSIYSLVAMGWFRQAPGKEREAV |
| | | AGIVSGGSTSYADSVKGRFTISADNSKNTAYLQMNSLKPEDTAVYYCAA |
| | | VGGATTVTASEWDWGQGTLVTVSS |
| IL1RL1-90 | 391 | EVQLVESGGGLVQPGGSLRLSCAASGVTLDLYAMGWFRQAPGKEREAV |
| | | ASISSSGSSIYYADSVKGRFTISADNSKNTAYLQMNSLKPEDTAVYYCAA |
| | | NYGGSVLYNWGQGTLVTVSS |
| IL1RL1-91 | 392 | EVQLVESGGGLVQPGGSLRLSCAASGGTFGSYAMGWFRQAPGKEREGV |
| | | AAIYTGGITTYADSVKGRFTISADNSKNTAYLQMNSLKPEDTAVYYCAA |
| | | FDGYSGSDWGQGTLVTVSS |
| IL1RL1-92 | 393 | EVQLVESGGGLVQPGGSLRLSCAASGRTHSTASMGWFRQAPGKEREEV |
| | | AAISWSGGRTYYADSVKGRFTISADNSKNTAYLQMNSLKPEDTAVYYC |
| | | ARLAFQGNTVFDLWGQGTLVTVSS |
| IL1RL1-93 | 394 | EVQLVESGGGLVQPGGSLRLSCAASGFTFSRFSTYVMGWFRQAPGKERE |
| | | GVAAIDSDGRTRYADSVKGRFTISADNSENTAYLQMNSLKPEDTAVYYC |
| | | AGRWDIVGAIWGQGTLVTVSS |
| IL1RL1-94 | 395 | EVQLVESGGGLVQPGGSLRLSCAASGFSLDYYGMGWFRQAPGKEREGV |
| | | ATINWSGATYADSVKGRFTISADNSKNTAYLQMNSLKPEDTAVYYCAIP |
| | | GVWGQGTLVTVSS |
| IL1RL1-95 | 396 | EVQLVESGGGLVQPGGSLRLSCAASGDISSIVAMGWFRQAPGKEREWVS |
| | | SGIAGTPTFYADSVKGRFTISADNSKNTAYLQMNSLKPEDTAVYYCAGR |
| | | SIGVDDMPYVWGQGTLVTVSS |
| IL1RL1-96 | 397 | EVQLVESGGGLVQPGGSLRLSCAASGRTFSGWFRQAPGKEREWVSSIGI |
| | | AGTPTFYADSVKGRFTISADNSKNTAYLQMNSLKPEDTAVYYCASTDDY |
| | | GVDWGQGTLVTVSS |
| IL1RL1-97 | 398 | EVQLVESGGGLVQPGGSLRLSCAASGFRFSSYGMGWFRQAPGKEREGV |
| | | AAIRWDGSTDYADSVKGRFTISADNSKNTAYLQMNSLKPEDTAVYYCAI |
| | | PGVWGQGTLVTVSS |
| IL1RL1-98 | 399 | EVQLVESGGGLVQPGGSLRLSCAASGLTFSDYIMGWFRQAPGKERELVA |
| | | GITSVGNTYADSVKGRFTISADNSKNTAYLQMNSLKPEDTAVYYCAMRS |
| | | VTRGSSDWGQGTLVTVSS |
| IL1RL1-99 | 400 | EVQLVESGGGLVQPGGSLRLSCAASGRIFSTYFMGWFRQAPGKERELVA |
| | | VIIDSRTTKYADSVKGRFTISADNSKNTAYLQMNSLKPEDTAVYYCAAV |
| | | GGATTVTASEWDWGQGTLVTVSS |
| IL1RL1- | 401 | EVQLVESGGGLVQPGGSLRLSCAASGRTFSSYAMGWFRQAPGKEREWV |
| 100 | | ASISTSGSTITPYADSVKGRFTISADNSKNTAYLQMNSLKPEDTAVYYCA |
| | | AIAYEEGVYRWDWGQGTLVTVSS |
| IL1RL1- | 402 | EVQLVESGGGLVQPGGSLRLSCAASGFTFADYAMGWFRQAPGKEREAV |
| 101 | | ASISSFGSTYYADSVKGRFTISADNSKNTAYLQMNSLKPEDTAVYYCAG |
| | | RWDIVGAIWGQGTLVTVSS |
| IL1RL1- | 403 | EVQLVESGGGLVQPGGSLRLSCAASGFPFGMYGMGWFRQAPGKEREVV |
| 102 | | AVIYTSDGSTYYADSVKGRFTISADNSKNTAYLQMNSLKPEDTAVYYCA |
| | | SGGAANGYWGQGTLVTVSS |
| IL1RL1- | 404 | EVQLVESGGGLVQPGGSLRLSCAASGDISSIVAMGWFRQAPGKERESVA |
| 103 | | SITTGSDWTYYADSVKGRFTISADNSKNTAYLQMNSLKPEDTAVYYCAA |
| | | RVVVRTAHGFEDNWGQGTLVTVSS |
| IL1RL1- | 405 | EVQLVESGGGLVQPGGSLRLSCAASGYTFRARAYVMGWFRQAPGKERE |
| 104 | | LVASITSDDRTYADSVKGRFTISADNSKNTAYLQMNSLKPEDTAVYYCA |
| | | GRWDIVGAIWGQGTLVTVSS |
| IL1RL1- | 406 | EVQLVESGGGLVQPGGSLRLSCAASGNIDGIITMGWFRQAPGKEREFVA |
| 105 | | GITQTSGRTDYADSVKGRFTISADNSKNTAYLQMNSLKPEDTAVYYCAA |
| | | LALGTDQSSTFDWGQGTLVTVSS |
| IL1RL1- | 407 | EVQLVESGGGLVQPGGSLRLSCAASGFSFDDDYVMGWFRQAPGKEREG |
| 106 | | VAAINWRGDITIYADSVKGRFTISADNSKNTAYLQMNSLKPEDTAVYYC |
| | | TRGLYGDSFHWGRGTLVTVSS |
| IL1RL1- | 408 | EVQLVESGGGLVQPGGSLRLSCAASGRTISVYAMGWFRQAPGKEREWV |
| 107 | | ASISTSGSTITPYADSVKGRFTISADNSKNTAYLQMNSLKPEDTA VYYCA |
| | | AAYSGHSSGRVSDFLWGQGTLVTVSS |
| IL1RL1- | 409 | EVQLVESGGGLVQPGGSLRLSCAASGRTFSTYAMGWFRQAPGKEREWV |
| 108 | | ASISTSGSTITPYADSVKGRFTISADNSKNTAYLQMNSLKPEDTAVYYCA |
| | | AIAYEEGVYRWDWGQGTLVTVSS |
| IL1RL1- | 410 | EVQLVESGGGLVQPGGSLRLSCAASGRTFSKYAMGWFRQAPGKERELV |
| 109 | | ALINWSSGITVYADSVKGRFTISADNSKNTAYLQMNSLKPEDTAVYYCA |
| | | RASRGMDVWGQGTLVTVSS |
| IL1RL1- | 411 | EVQLVESGGGLVQPGGSLRLSCAASGITLDYYAMGWFRQAPGKEREAV |
| 110 | | ASISTGGGSTYYADSVKGRFTISADNSKNTAYLQMNSLKPEDTAVYYCA |
| | | GRLSNGLDWGQGTLVTVSS |
| IL1RL1- | 412 | EVQLVESGGGLVQPGGSLRLSCAASGGAFSGLVMGWFRQAPGKEREMV |
| 111 | | AVIIDSRTTKYADSVKGRFTISADNSKNTAYLQMNSLKPEDTAVYYCAA |
| | | VGGATTVTASEWDWGQGTLVTVSS |
| IL1RL1- | 413 | EVQLVESGGGLVQPGGSLRLSCAASGFTFGDYAMGWFRQAPGKEREWV |
| 112 | | ASITSSGSTNYADSVKGRFTISADNSKNTAYLQMNSLKPEDTAVYYCAG |
| | | RWLEIGAEWGQGTLVTVSS |
| IL1RL1- | 414 | EVQLVESGGGLVQPGGSLRLSCAASGFTFSDYAMGWFRQAPGKEREFV |
| 113 | | AAITWNSGRTNYADSVKGRFTISADNSKNTAYLQMNSLKPEDTAVYYC |
| | | AYSGIGTDWGQGTLVTVSS |
| IL1RL1- | 415 | EVQLVESGGGLVQPGGSLRLSCAASGRTFSNGPMGWFRQAPGKEREGV |
| 114 | | ASINTRGGDSTYYADSVKGRFTISADNSKNTAYLQMNSLKPEDTAVYYC |
| | | AIPGVWGQGTLVTVSS |
| IL1RL1- | 416 | EVQLVESGGGLVQPGGSLRLSCAASGRTYSISAMGWFRQAPGKEREWV |
| 115 | | ASISTSGSTITPYADSVKGRFTISADNSKNTAYLQMNSLKPEDTAVYYCA |
| | | AASFAPGSRGYDWGQGTLVTVSS |
| IL1RL1- | 417 | EVQLVESGGGLVQPGGSLRLSCAASGRTYDAMGWFRQAPGKEREWVSS |
| 116 | | ISPGGLFPYYADSVKGRFTISADNSKNTAYLQMNSLKPEDTAVYYCAAV |
| | | YVSTWGNGYDWGQGTLVTVSS |
| IL1RL1- | 418 | EVQLVESGGGLVQPGGSLRLSCAASGNIDRLYAMGWFRQAPGKEREWV |
| 117 | | SSIGIAGTPTFYADSVKGRFTISADNSKNTAYLQMNSLKPEDTAVYYCAA |
| | | KTGTSFVWGQGTLVTVSS |
| IL1RL1- | 419 | EVQLVESGGGLVQPGGSLRLSCAASGFTFDDYPMGWFRQAPGKEREAV |
| 118 | | ASIWRSANTYYADSVKGRFTISADNSKNTAYLQMNILKPEDTAVYYCAT |
| | | VSPDYYGSRSFYWGQGTLVTVSS |
| IL1RL1- | 420 | EVQLVESGGGLVQPGGSLRLSCAASGNIDGIITMGWFRQAPGKEREGVA |
| 119 | | AIRWSGGSAFYADSVKGRFTISADNSKNTAYLQMNSLKPEDTAVYYCA |
| | | ALDITTAASWGQGTLVTVSS |
| IL1RL1- | 421 | EVQLVESGGGLVQPGGSLRLSCAASGFSFDDDYVMGWFRQAPGKEREM |
| 120 | | VARITSGGSTGYADSVKGRFTISADNSKNTAYLQMNSLKPEDTAVYYCA |
| | | GRWLEIGAEWGQGTLVTVSS |
| IL1RL1- | 422 | EVQLVESGGGLVQPGGSLRLSCAASGFTFGHYAMGWFRQAPGKEREGV |
| 121 | | AAIYSGGITTYADSVKGRFTISADNSKNTAYLQMNSLKPEDTAVYYCAA |
| | | FDGYSGSDWGQGTLVTVSS |
| IL1RL1- | 423 | EVQLVESGGGLVQPGGSLRLSCAASGRNFRRNSMGWFRQAPGKEREFV |
| 122 | | AVISWNNNYIHYADSVKGRFTISADNSKNTAYLQMNSLKPEDTAVYYC |
| | | AAAEPAGVYDWGQGTLVTVSS |
| IL1RL1- | 424 | EVQLVESGGGLVQPGGSLRLSCAASGGRFSDYGMGWFRQAPGKEREEV |
| 123 | | AAISWIIGSTYYADSVKGRFTISADNSKNTAYLQMNSLKPEDTAVYYCAS |
| | | PGLGWGQGTLVTVSS |
| IL1RL1- | 425 | EVQLVESGGGLVQPGGSLRLSCAASGIPSSIRAMGWFRQAPGKEREFVA |
| 124 | | AITPTSYADSVKGRFTISADNSKNTAYLQMNSLKPEDTAVYYCAAIAYEE |
| | | GVYRWDWGQGTLVTVSS |
| IL1RL1- | 426 | EVQLVESGGGLVQPGGSLRLSCAASGFNSGSYTMGWFRQAPGKEREFV |
| 125 | | AYISSGTDTYYADSVKGRFTISADNSKNTAYLQMNSLKPEDTAVYYCAA |
| | | TERMHHSWGQGTLVTVSS |
| IL1RL1- | 427 | EVQLVESGGGLVQPGGSLRLSCAASGLTFSSYAMGWFRQAPGKEREWV |
| 126 | | SAISSGGDGRSYYADSVKGRFTISADNSKNTAYLQMNSLKPEDTAVYYC |
| | | AAYQRGWGDWGQGTLVTVSS |
| IL1RL1- | 428 | EVQLVESGGGLVQPGGSLRLSCAASGDTFSIYAMGWFRQAPGKEREFVA |
| 127 | | SISTSGVGTFYADSVKGRFTISADNSKNTAYLQMNSLKPEDTAVYYCATS |
| | | GSGSPNWGQGTLVTVSS |
| IL1RL1- | 429 | EVQLVESGGGLVQPGGSLRLSCAASGRTFSVKDMGWFRQAPGKEREFV |
| 128 | | AAIGGVTDYADSVKGRFTISADNSKNTAYLQMNSLKPEDTAVYYCAAIA |
| | | YEEGVYRWDWGQGTLVTVSS |
| IL1RL1- | 430 | EVQLVESGGGLVQPGGSLRLSCAASGIPFRSRTMGWFRQAPGKEREFVA |
| 129 | | GIWSGGYTYADSVKGRFTISADNSKNTAYLQMNSLKPEDTAVYYCAAV |
| | | SSNTETFDWGQGTLVTVSS |
| IL1RL1- | 431 | EVQLVESGGGLVQPGGSLRLSCAASGRSISDYTMGWFRQAPGKEREFVA |
| 130 | | GIWSGGYTYADSVKGRFTISADNSKNTAYLQMNSLKPEDTAVYYCAAV |
| | | SSNSETFDWGQGTLVTVSS |
| IL1RL1- | 432 | EVQLVESGGGLVQPGGSLRLSCAASGFSFADYAMGWFRQAPGKEREWV |
| 131 | | ASITSTGSTGYADSVKGRFTISADNSKNTAYLQMNSLKPEDTAVYYCAG |
| | | RWDIVGAIWGQGTLVTVSS |
| IL1RL1- | 433 | EVQLVESGGGLVQPGGSLRLSCAASGFSFADYAMGWFRQAPGKEREFV |
| 132 | | AAITWNSGRTNYADSVKGRFTISADNSKNTAYLQMNSLKPEDTAVYYC |
| | | AYSGIGTDWGQGTLVTVSS |
| IL1RL1- | 434 | EVQLVESGGGLVQPGGSLRLSCAASGRTFSVITMGWFRQAPGKERELVA |
| 133 | | SITYLGRTNYADSVKGRFTISADNSKNTAYLQMNSLKPEDTAVYYCAAL |
| | | ALGTDQSSTFDWGQGTLVTVSS |
| IL1RL1- | 435 | EVQLVESGGGLVQPGGSLRLSCAASGGTAYAMGWFRQAPGKEREWVA |
| 134 | | SISTSGSTITPYADSVKGRFTISADNSKNTAYLQMNSLKPEDTAVYYCAAI |
| | | AYEEGVYRWDWGQGTLVTVSS |
| IL1RL1- | 436 | EVQLVESGGGLVQPGGSLRLSCAASGHAFISYPMGWFRQAPGKEREWV |
| 135 | | SIIFTNGEGTYYADSVKGRFTISADNSKNTAYLQMNSLKPEDTAVYYCA |
| | | RSIVGDSGVVDYWGQGTLVTVSS |
| IL1RL1- | 437 | EVQLVESGGGLVQPGGSLRLSCAASGDISSIVAMGWFRQAPGKEREWV |
| 136 | | ASISTSGSTITPYADSVKGRFTISADNSKNTAYLQMNSLKPEDTAVYYCA |
| | | AKALLGMTNPAGYEWGQGTLVTVSS |
| IL1RL1- | 438 | EVQLVESGGGLVQPGGSLRLSCAASGSFSIAAMGWFRQAPGKEREFVAV |
| 137 | | TRSGGSTAYADSVKGRFTISADNSKNTAYLQMNSLKPEDTAVYYCAAL |
| | | DITTAASWGQGTLVTVSS |
| IL1RL1- | 439 | EVQLVESGGGLVQPGGSLRLSCAASGFTFSSKTMGWFRQAPGKEREFVA |
| 138 | | GIWSGGYTHYADSVKGRFTISADNSKNTAYLQMNSLKPEDTAVYYCAA |
| | | VSSNTEIFDWGQGTLVTVSS |
| IL1RL1- | 440 | EVQLVESGGGLVQPGGSLRLSCAASGNAFSSSVMGWFRQAPGKERELV |
| 139 | | AVIIDSRTTKYADSVKGRFTISADNSKNTAYLQMNSLKPEDTAVYYCAA |
| | | VGGATTVTASEWDWGQGTLVTVSS |
| IL1RL1- | 441 | EVQLVESGGGLVQPGGSLRLSCAASGFRFGDYPMGWFRQAPGKEREGV |
| 140 | | AAMFTGTGSRTYYADSVKGRFTISADNSKNTAYLQMNSLKPEDTAVYY |
| | | CAIPGVWGQGTLVTVSS |
| IL1RL1- | 442 | EVQLVESGGGLVQPGGSLRLSCAASGYTFRARAYVMGWFRQAPGKERE |
| 141 | | GVASISSGGTTAYADSVKGRFTISADNSKNTAYLQMNSLKPEDTAVYYC |
| | | AGRWDIVGAIWGQGTLVTVSS |
| IL1RL1- | 443 | EVQLVESGGGLVQPGGSLRLSCAASGGTAYAMGWFRQAPGKEREWVSS |
| 142 | | IGIAGTPTFYADSVKGRFTISADNSKNTAYLQMNSLKPEDTAVYYCAAN |
| | | YGGSVLYNWGQGTLVTVSS |
| IL1RL1- | 444 | EVQLVESGGGLVQPGGSLRLSCAASGFTFSDYVMGWFRQAPGKEREFV |
| 143 | | ARISSGGSTYYADSVKGRFTISADNSKNTAYLQMNSLKPEDTAVYYCAG |
| | | RWLEIGAEWGQGTLVTVSS |
| IL1RL1- | 445 | EVQLVESGGGLVQPGGSLRLSCAASGRTYAMGWFRQAPGKEREGVAAI |
| 144 | | YSGGITTYADSVKGRFTISADNSKNTAYLQMNSLKPEDTAVYYCAAFDG |
| | | YSGSDWGQGTLVTVSS |
| IL1RL1- | 446 | EVQLVESGGGLVQPGGSLRLSCAASGVTLDLYAMGWFRQAPGKEREW |
| 145 | | VSSIGIAGTPTFYADSVKGRFTISADNSKNTAYLQMNSLKPEDTAVYYCA |
| | | ANVGVTGSYEWGQGTLVTVSS |
| IL1RL1- | 447 | EVQLVESGGGLVQPGGSLRLSCAASGRTFTTYSMGWFRQAPGKEREWV |
| 146 | | ASISTSGSTITPYADSVKGRFTISADNSKNTAYLQMNSLKPEDTAVYYCA |
| | | AIAYEEGVYRWDWGQGTLVTVSS |
| IL1RL1- | 448 | EVQLVESGGGLVQPGGSLRLSCAASGRTISVYAMGWFRQAPGKEREWV |
| 147 | | SSIGIAGTPTFYADSVKGRFTISADNSKNTAYLQMNSLKPEDTAVYYCAA |
| | | VSSNTETFDWGQGTLVTVSS |
| IL1RL1- | 449 | EVQLVESGGGLVQPGGSLRLSCAASGLTAGTYAMGWFRQAPGKEREGV |
| 148 | | AAIDWDGSRTQYADSVKGRFTISADNSKNTAYLQMNSLKPEDTAVYYC |
| | | AAIAYEEGVYRWDWGQGTLVTVSS |
| IL1RL1- | 450 | EVQLVESGGGLVQPGGSLRLSCAASGLTFSTYPMGWFRQAPGKEREGV |
| 149 | | AAIYSGGITTYADSVKGRFTISADNSKNTAYLQMNSLKPEDTAVYYCVR |
| | | GGDYGLDWGQGTLVTVSS |
| IL1RL1- | 451 | EVQLVESGGGLVQPGGSLRLSCAASGRTLSVYAMGWFRQAPGKEREWV |
| 150 | | SSIGIAGTPTFYADSVKGRFTISADNSKNTAYLQMNSLKPEDTAVYYCAA |
| | | KTGTSFVWGQGTLVTVSS |
| IL1RL1- | 452 | EVQLVESGGGLVQPGGSLRLSCAASGRTFSVITMGWFRQAPGKEREGVA |
| 151 | | SIRNTGGSMYADSVKGRFTISADNSKNTAYLQMNSLKPEDTAVYYCAAI |
| | | AHEEGVYRWDWGQGTLVTVSS |
| IL1RL1- | 453 | EVQLVESGGGLVQPGGSLRLSCAASGGTFSSYAMGWFRQAPGKEREWV |
| 152 | | ASISTSGSTITPYADSVKGRFTISADNSKNTAYLQMNSLKPEDTAVYYCA |
| | | AIAYEEGVYRWDWGQGTLVTVSS |
| IL1RL1- | 454 | EVQLVESGGGLVQPGGSLRLSCAASGRSFSNYVMGWFRQAPGKEREFL |
| 153 | | ATIISDGNTRYADSVKGRFTISADNSKNTAYLQMNSLKPEDTAVYYCAL |
| | | GPGNYWGQGTLVTVSS |
| IL1RL1- | 455 | EVQLVESGGGLVQPGGSLRLSCAASGRTLSVYAMGWFRQAPGKEREGI |
| 154 | | AAIYTGGVSSTTYADSVKGRFTISADNSKNTAYLQMNSLKPEDTAVYYC |
| | | AAFDGYSGSDWGQGTLVTVSS |
| IL1RL1- | 456 | EVQLVESGGGLVQPGGSLRLSCAASGFSFDDDYVMGWFRQAPGKEREL |
| 155 | | VAAITSAGGRTNYADSVKGRFTISADNSKNTAYLQMNSLKPEDTAVYYC |
| | | AGRWLEIGAEWGQGTLVTVSS |
| IL1RL1- | 457 | EVQLVESGGGLVQPGGSLRLSCAASGDYYAMGWFRQAPGKEREWVSSI |
| 156 | | GIAGTPTFYADSVKGRFTISADNSKNTAYLQMNSLKPEDTAVYYCAAKT |
| | | GTSFVWGQGTLVTVSS |
| IL1RL1- | 458 | EVQLVESGGGLVQPGGSLRLSCAASGGAFSGLVMGWFRQAPGKEREFV |
| 157 | | AAINYRGSTHYADSVKGRFTISADNSKNTAYLQMNSLKPEDTAVYYCAI |
| | | PTENQPDWGQGTLVTVSS |
| IL1RL1- | 459 | EVQLVESGGGLVQPGGSLRLSCAASGRTFSMYAMGWFRQAPGKEREW |
| 158 | | VASISTSGSTITPYADSVKGRFTISADNSKNTAYLQMNSLKPEDTAVYYC |
| | | AAIAHEEGVYRWDWGQGTLVTVSS |
| IL1RL1- | 460 | EVQLVESGGGLVQPGGSLRLSCAASGFSFGDYVMGWFRQAPGKEREFV |
| 159 | | ASISSGSAINYADSVKGRFTISADNSKNTAYLQMNSLKPEDTAVYYCAG |
| | | RWLEIGAEWGQGTLVTVSS |
| IL1RL1- | 461 | EVQLVESGGGLVQPGGSLRLSCAASGRTSNIYAMGWFRQAPGKEREWV |
| 160 | | ASIASGASAIYADSVKGRFTISADNSKNTAYLQMNSLKPEDTAVYYCAA |
| | | GSHSDYAPDYDWGQGTLVTVSS |
| IL1RL1- | 462 | EVQLVESGGGLVQPGGSLRLSCAASGYTYIMGWFRQAPGKEREFVAGIS |
| 161 | | QSGVGTAYADSVKGRFTISADNSKNTAYLQMNSLKPEDTAVYYCATYG |
| | | SGSYYDAFDIWGQGTLVTVSS |
| IL1RL1- | 463 | EVQLVESGGGLVQPGGSLRLSCAASGIPSIHAMGWFRQAPGKEREWVSS |
| 162 | | IGIAGTPTFYADSVKGRFTISADNSKNTAYLQMNSLKPEDTAVYYCAFIT |
| | | TNSDYDLGRRWGQGTLVTVSS |
| IL1RL1- | 464 | EVQLVESGGGLVQPGGSLRLSCAASGFTLAYYAMGWFRQAPGKEREFV |
| 163 | | GGITLGGSTTYADSVKGRFTISADNSKNTAYLQMNSLKPEDTAVYYCAV |
| | | VDQLRGKLWGQGTLVTVSS |
| IL1RL1- | 465 | EVQLVESGGGLVQPGGSLRLSCAASGSFSIAAMGWFRQAPGKEREWVSS |
| 164 | | IGIAGTPTFYADSVKGRFTISADNSKNTAYLQMNSLKPEDTAVYYCAAG |
| | | DTGGAAYGWGQGTLVTVSS |
| IL1RL1- | 466 | EVQLVESGGGLVQPGGSLRLSCAASGSIFSISVMGWFRQAPGKEREWVS |
| 165 | | SISAGGYSTTYADSVKGRFTISADNSKNTAYLQMNSLKPEDTAVYYCAA |
| | | RIRGKVTVDNFDYAWGQGTLVTVSS |
| IL1RL1- | 467 | EVQLVESGGGLVQPGGSLRLSCAASGRTFGSYAMGWFRQAPGKERELV |
| 166 | | AAISPAAVTTYYADSVKGRFTISADNSKNTAYLQMNSLKPEDTAVYYCA |
| | | AYQRGWGDWGQGTLVTVSS |
| IL1RL1- | 468 | EVQLVESGGGLVQPGGSLRLSCAASGGSLSNYVMGWFRQAPGKEREGV |
| 167 | | AAIYTGGGTTMYADSVKGRFTISADNSKNTAYLQMNSLKPEDTAVYYC |
| | | AARPVRVDDISLPVGFDWGQGTLVTVSS |
| IL1RL1- | 469 | EVQLVESGGGLVQPGGSLRLSCAASGTIFASAMGWFRQAPGKEREFVAD |
| 168 | | IRMMLGSTTYADSVKGRFTISADNSKNTAYLQMNSLKPEDTAVYYCAR |
| | | AGITVSGTLGVSWGQGTLVTVSS |
| IL1RL1- | 470 | EVQLVESGGGLVQPGGSLRLSCAASGFTFSNAVMGWFRQAPGKEREFV |
| 169 | | GGITLGGSTTYADSVKGRFTISADNSKNTAYLQMNSLKPEDTAVYYCAA |
| | | SAIGSGALRRFEYDWGQGTLVTVSS |
| IL1RL1- | 471 | EVQLVESGGGLVQPGGSLRLSCAASGDTYSSAAMGWFRQAPGKEREGV |
| 170 | | ASITSSGTAIYADSVKGRFTISADNSKNTAYLQMNSLKPEDTAVYYCAAL |
| | | DITTAASWGQGTLVTVSS |
| IL1RL1- | 472 | EVQLVESGGGLVQPGGSLRLSCAASGFTFGDYAMGWFRQAPGKEREWV |
| 171 | | ASITSGGNTNYADSVKGRFTISADNSKNTAYLQMNSLKPEDTAVYYCAG |
| | | RWLEIGAEWGQGTLVTVSS |
| IL1RL1- | 473 | EVQLVESGGGLVQPGGSLRLSCAASGSTFSINAMGWFRQAPGKEREGVA |
| 172 | | GITPGGNTNYADSVKGRFTISADNSKNTAYLQMNSLKPEDTAVYYCAHR |
| | | SIGPYGYFFDSWGQGTLVTVSS |
| IL1RL1- | 474 | EVQLVESGGGLVQPGGSLRLSCAASGFTFSGNWMGWFRQAPGKERELV |
| 173 | | ASISSFGSTYYADSVKGRFTISADNSKNTAYLQMNSLKPEDTAVYYCAH |
| | | RSDSSGYYYLDYWGQGTLVTVSS |
| IL1RL1- | 475 | EVQLVESGGGLVQPGGSLRLSCAASGGSFSVKDMGWFRQAPGKEREFV |
| 174 | | SSISGGGSNTVYADSVKGRFTISADNSKNTAYLQMNSLKPEDTAVYYCA |
| | | AIAHEEGVYRWDWGQGTLVTVSS |
| IL1RL1- | 476 | EVQLVESGGGLVQPGGSLRLSCAASGRTFGTYAMGWFRQAPGKEREWV |
| 175 | | ASISTSGSTITPYADSVKGRFTISADNSKNTAYLQMNSLKPEDTAVYYCA |
| | | AIAYEEGVYRWDWGQGTLVTVSS |
| IL1RL1- | 477 | EVQLVESGGGLVQPGGSLRLSCAASGFSLDYYGMGWFRQAPGKEREGV |
| 176 | | ATINWSGATYADSVKGRFTISADNSKNTAYLQMNSLKPEDTAVYYCAA |
| | | VGGATTVTASEWDWGQGTLVTVSS |
| IL1RL1- | 478 | EVQLVESGGGLVQPGGSLRLSCAASGGTFSLYSMGWFRQAPGKEREWV |
| 177 | | ASISTSGSTITPYADSVKGRFTISADNSKNTAYLQMNSLKPEDTAVYYCA |
| | | ANYGGSLSWGQGTLVTVSS |
| IL1RL1- | 479 | EVQLVESGGGLVQPGGSLRLSCAASGSISSIGAMGWFRQAPGKEREWVS |
| 178 | | SIGIAGTPTFYADSVKGRFTISADNSKNTAYLQMNSLKPEDTAVYYCAAR |
| | | LTMATPNQSQYYWGQGTLVTVSS |
| IL1RL1- | 480 | EVQLVESGGGLVQPGGSLRLSCAASGFTLNDYAMGWFRQAPGKEREEV |
| 179 | | AAISWIIGSTYYADSVKGRFTISADNSKNTAYLQMNSLKPEDTAVYYCA |
| | | AIAHEEGVYRWDWGQGTLVTVSS |
| IL1RL1- | 481 | EVQLVESGGGLVQPGGSLRLSCAASGYTFRNYAMGWFRQAPGKEREFV |
| 180 | | AAISRDGDRTYYADSVKGRFTISADNSKNTAYLQMNSLKPEDTAVYYC |
| | | AAYQRGWGDWGQGTLVTVSS |
| IL1RL1- | 482 | EVQLVESGGGLVQPGGSLRLSCAASGRTSNIYAMGWFRQAPGKEREWV |
| 181 | | SSISTGGGGTYYADSVKGRFTISADNSKNTAYLQMNSLKPEDTAVYYCA |
| | | MNRAGIYEWGQGTLVTVSS |
| IL1RL1- | 483 | EVQLVESGGGLVQPGGSLRLSCAASGGTFSGRGMGWFRQAPGKEREWV |
| 182 | | STINSGGGTDYADSVKGRFTISADNSKNTAYLQMNSLKPEDTAVYYCAL |
| | | RRLSPPPLLDWGQGTLVTVSS |
| IL1RL1- | 484 | EVQLVESGGGLVQPGGSLRLSCAASGHTSDTYIMGWFRQAPGKERERV |
| 183 | | AAISWSTGSTYYADSVKGRFTISADNSKNTAYLQMNSLKPEDTAVYYCA |
| | | ADMLPSDLSHGYYYRDWGQGTLVTVSS |
| IL1RL1- | 485 | EVQLVESGGGLVQPGGSLRLSCAASGRTSNIYAMGWFRQAPGKEREWV |
| 184 | | SSGIAGTPTFYADSVKGRFTISADNSKNTAYLQMNSLKPEDTAVYYCAA |
| | | KTGTPFVWGQGTLVTVSS |
| IL1RL1- | 486 | EVQLVESGGGLVQPGGSLRLSCAASGLTFGTYTMGWFRQAPGKEREFV |
| 185 | | AGINWESGSTDYADSVKGRFTISADNSKNTAYLQMNSLKPEDTAVYYC |
| | | ARSYCTADSCYSSWFDPWGQGTLVTVSS |
| IL1RL1- | 487 | EVQLVESGGGLVQPGGSLRLSCAASGGTFNVYAMGWFRQAPGKEREW |
| 186 | | VSSIGIAGTPTFYADSVKGRFTISADNSKNTAYLQMNSLKPEDTAVYYCA |
| | | AKTGTPFVWGQGTLVTVSS |
| IL1RL1- | 488 | EVQLVESGGGLVQPGGSLRLSCAASGRRFSAYGMGWFRQAPGKEREWV |
| 187 | | SGINRDGSTFYADSVKGRFTISADNSKNTAYLQMNSLKPEDTAVYYCAL |
| | | RRLSPPPLLDWGQGTLVTVSS |
| IL1RL1- | 489 | EVQLVESGGGLVQPGGSLRLSCAASGSIYSLIAMGWFRQAPGKEREGVS |
| 188 | | SISSSDGRTYYADSVKGRFTISADNSKNTAYLQMNSLKPEDTAVYYCAAI |
| | | AYEEGVYRRDWGQGTLVTVSS |
| IL1RL1- | 490 | EVQLLESGGGLVQPGGSLRLSCAASGFTFSSYFMSWVRQAPGKGLEWVS |
| 189 | | AISREGRATYYADSVKGRFTISRDNSKNTLYLQMNSLRAEDTAVYYCAR |
| | | IRVGPSGGAFDYWGQGTLVTVSS |
| IL1RL1- | 491 | EVQLLESGGGLVQPGGSLRLSCAASGFTFSNYGVSWVRQAPGKGLEWV |
| 190 | | SAISGNGGSTFYADSVKGRFTISRDNSKNTLYLQMNSLRAEDTAVYYCA |
| | | KGLGRFDYWGQGTLVTVSS |
| IL1RL1- | 492 | EVQLLESGGGLVQPGGSLRLSCAASGFTFKDYGMNWVRQAPGKGLEW |
| 191 | | VSGITRSGSTNYRDSVKGRFTISRDNSKNTLYLQMNSLRAEDTAVYYCA |
| | | KGARRFDYWGQGTLVTVSS |
| IL1RL1- | 493 | EVQLLESGGGLVQPGGSLRLSCAASGFTFGNYAMAWVRQAPGKGLEW |
| 192 | | VSGITRSGSTNYRDSVKGRFTISRDNSKNTLYLQMNSLRAEDTAVYYCA |
| | | RDRYFRQQNAFDYWGQGTLVTVSS |
| IL1RL1- | 494 | EVQLLESGGGLVQPGGSLRLSCAASGFTFAKYKMWWVRQAPGKGLEW |
| 193 | | VSGITRSGSTNYRDSVKGRFTISRDNSKNTLYLQMNSLRAEDTAVYYCA |
| | | SLSRGYWGQGTLVTVSS |
| IL1RL1- | 495 | EVQLLESGGGLVQPGGSLRLSCAASGFTFSRYFMGWVRQAPGKGLEWV |
| 194 | | SGSGGSTYYADSVKGRFTISRDNSKNTLYLQMNSLRAEDTAVYYCARG |
| | | WDLDYWGQGTLVTVSS |
| IL1RL1- | 496 | EVQLLESGGGLVQPGGSLRLSCAASGFTFSNYGMSWVRQAPGKGLEWV |
| 195 | | SGIAHNGRNTYYADSVKGRFTISRDNSKNTLYLQMNSLRAEDTAVYYC |
| | | AKGLRRFDYWGQGTLVTVSS |
| IL1RL1- | 497 | EVQLLESGGGLVQPGGSLRLSCAASGFTFHKYGMAWVRQAPGKGLEW |
| 196 | | VSGITRSGSTNYRDSVKGRFTISRDNSKNTLYLQMNSLRAEDTAVYYCA |
| | | KGLRAFDYWGQGTLVTVSS |
| IL1RL1- | 498 | EVQLLESGGGLVQPGGSLRLSCAASGFTFGDHGMGWVRQAPGKGLEW |
| 197 | | VSQISETGRRTYYADSVKGRFTISRDNSKNTLYLQMNSLRAEDTAVYYC |
| | | AKDKRYRGSQHYFDYWGQGTLVTVSS |
| IL1RL1- | 499 | EVQLLESGGGLVQPGGSLRLSCAASGFTFSKYQMTWVRQAPGKGLEWV |
| 198 | | GYISNSGSTSYNDSVKGRFTISRDNSKNTLYLQMNSLRAEDTAVYYCAK |
| | | SPKVSLFDYWGQGTLVTVSS |
| IL1RL1- | 500 | EVQLLESGGGLVQPGGSLRLSCAASGYSISSGYHWAWVRQAPGKGLEW |
| 199 | | VSSISGSSGTTYYADSVKGRFTISRDNSKNTLYLQMNSLRAEDTAVYYC |
| | | AKGPGTRGDYWGQGTLVTVSS |
| IL1RL1- | 501 | EVQLLESGGGLVQPGGSLRLSCAASGFTFKSYGMHWVRQAPGKGLEWV |
| 200 | | SLIPHTGNPTYYADSVKGRFTISRDNSKNTLYLQMNSLRAEDTAVYYCA |
| | | RGGPRGNKYYFDYWGQGTLVTVSS |
| IL1RL1- | 502 | EVQLLESGGGLVQPGGSLRLSCAASGFTFHKYGMAWVRQAPGKGLEW |
| 201 | | VSAITGSGGSTYYADSVKGRFTISRDNSKNTLYLQMNSLRAEDTAVYYC |
| | | ARSRWLLDYWGQGTLVTVSS |
| IL1RL1- | 503 | EVQLLESGGGLVQPGGSLRLSCAASGFTFSRYAMNWVRQAPGKGLEWV |
| 202 | | SSISGSSGTTYYADSVKGRFTISRDNSKNTLYLQMNSLRAEDTAVYYCA |
| | | KDRGAAAGAFDYWGQGTLVTVSS |
| IL1RL1- | 504 | EVQLLESGGGLVQPGGSLRLSCAASGFTFSKYQMTWVRQAPGKGLEWV |
| 203 | | SGITRSGSTNYRDSVKGRFTISRDNSKNTLYLQMNSLRAEDTAVYYCAK |
| | | GSLRHFDYWGQGTLVTVSS |
| IL1RL1- | 505 | EVQLLESGGGLVQPGGSLRLSCAASGFTFKAYEMGWVRQAPGKGLEWV |
| 204 | | SSISGYGSTTYYADSVKGRFTISRDNSKNTLYLQMNSLRAEDTAVYYCA |
| | | KAGRKFDYWGQGTLVTVSS |
| IL1RL1- | 506 | EVQLLESGGGLVQPGGSLRLSCAASGFTFRSYTMGWVRQAPGKGLEWV |
| 205 | | SSIRGSSSSTYYADSVKGRFTISRDNSKNTLYLQMNSLRAEDTAVYYCAK |
| | | GVRKGFDYWGQGTLVTVSS |
| IL1RL1- | 507 | EVQLLESGGGLVQPGGSLRLSCAASGFTFSRYAMNWVRQAPGKGLEWV |
| 206 | | SSISGSSGTTYYADSVKGRFTISRDNSKNTLYLQMNSLRAEDTAVYYCA |
| | | KSHKRFDYWGQGTLVTVSS |
| IL1RL1- | 508 | EVQLLESGGGLVQPGGSLRLSCAASGFTFGNYRMTWVRQAPGKGLEWV |
| 207 | | SGITRSGSTNYRDSVKGRFTISRDNSKNTLYLQMNSLRAEDTAVYYCAR |
| | | GNYFDYWGQGTLVTVSS |
| IL1RL1- | 509 | EVQLLESGGGLVQPGGSLRLSCAASGFTFSSAAMSWVRQAPGKGLEWV |
| 208 | | SSISGSSGTTYYADSVKGRFTISRDNSKNTLYLQMNSLRAEDTAVYYCA |
| | | KGLRRFDYWGQGTLVTVSS |
| IL1RL1- | 510 | EVQLLESGGGLVQPGGSLRLSCAASGFTFSRYAMNWVRQAPGKGLEWV |
| 209 | | SGISSGGDTYYVDSVKGRFTISRDNSKNTLYLQMNSLRAEDTAVYYCAR |
| | | HKGLQPLDYWGQGTLVTVSS |
| IL1RL1- | 511 | EVQLLESGGGLVQPGGSLRLSCAASGFTFHKYGMAWVRQAPGKGLEW |
| 210 | | VSSISGYGSTTYYADSVKGRFTISRDNSKNTLYLQMNSLRAEDTAVYYC |
| | | AKRGKQFDYWGQGTLVTVSS |
| IL1RL1- | 512 | EVQLLESGGGLVQPGGSLRLSCAASGFTFSRYFMGWVRQAPGKGLEWV |
| 211 | | SSISNSGGSTYYADSVKGRFTISRDNSKNTLYLQMNSLRAEDTAVYYCA |
| | | KAGRKFDYWGQGTLVTVSS |
| IL1RL1- | 513 | EVQLLESGGGLVQPGGSLRLSCAASGFTFSRYGMHWVRQAPGKGLEWV |
| 212 | | STINQAGLRTYYADSVKGRFTISRDNSKNTLYLQMNSLRAEDTAVYYCA |
| | | RSYGGGFDYWGQGTLVTVSS |
| IL1RL1- | 514 | EVQLLESGGGLVQPGGSLRLSCAASGFTLSSYAMSWVRQAPGKGLEWV |
| 213 | | STINQAGLRTYYADSVKGRFTISRDNSKNTLYLQMNSLRAEDTAVYYCA |
| | | KRTRSKFDYWGQGTLVTVSS |
| IL1RL1- | 515 | EVQLLESGGGLVQPGGSLRLSCAASGFTFNAYPMTWVRQAPGKGLEWV |
| 214 | | SAISGRGDNTYYADSVKGRFTISRDNSKNTLYLQMNSLRAEDTAVYYCA |
| | | RPPKRGPRFDYWGQGTLVTVSS |
| IL1RL1- | 516 | EVQLLESGGGLVQPGGSLRLSCAASGFTFNHYGMGWVRQAPGKGLEW |
| 215 | | VSVIRPSGGITTYADSVKGRFTISRDNSKNTLYLQMNSLRAEDTAVYYCA |
| | | KAYYGGFDYWGQGTLVTVSS |
| IL1RL1- | 517 | EVQLLESGGGLVQPGGSLRLSCAASGFTFRRYVMGWVRQAPGKGLEWV |
| 216 | | SDIGASGSATSYADSVKGRFTISRDNSKNTLYLQMNSLRAEDTAVYYCA |
| | | KGLRRFDYWGQGTLVTVSS |
| IL1RL1- | 518 | EVQLLESGGGLVQPGGSLRLSCAASGFTFSKYQMTWVRQAPGKGLEWV |
| 217 | | SSIRGSSSSTYYADSVKGRFTISRDNSKNTLYLQMNSLRAEDTAVYYCAR |
| | | SYGGGFDYWGQGTLVTVSS |
| IL1RL1- | 519 | EVQLLESGGGLVQPGGSLRLSCAASGFTFDRYRMMWVRQAPGKGLEW |
| 218 | | VSAISGRGDNTYYADSVKGRFTISRDNSKNTLYLQMNSLRAEDTAVYYC |
| | | AKPGRLFDYWGQGTLVTVSS |
| IL1RL1- | 520 | EVQLLESGGGLVQPGGSLRLSCAASGFTFAKYKMWWVRQAPGKGLEW |
| 219 | | VSSIDDRGRYTYYADSVKGRFTISRDNSKNTLYLQMNSLRAEDTAVYYC |
| | | AKRTRSKFDYWGQGTLVTVSS |
| IL1RL1- | 521 | EVQLLESGGGLVQPGGSLRLSCAASGFTFSRYAMNWVRQAPGKGPEWV |
| 220 | | GKINYAGNTDYNDSVKGRFTISRDNSKNTLYLQMNSLRAEDTAVYYCA |
| | | KAGRKFDYWGQGTLVTVSS |
| IL1RL1- | 522 | EVQLLESGGGLVQPGGSLRLSCAASGFTFPKYDMMWVRQAPGKGLEW |
| 221 | | VSSIRGSSSSTYYADSVKGRFTISRDNSKNTLYLQMNSLRAEDTAVYYCA |
| | | RAGRILFDYWGQGTLVTVSS |
| IL1RL1- | 523 | EVQLLESGGGLVQPGGSLRLSCAASGFTFSRYAMNWVRQAPGKGLEWV |
| 222 | | SGITRSGSTNYRDSVKGRFTISRDNSKNTLYLQMNSLRAEDTAVYYCAK |
| | | GTTRFDYWGQGTLVTVSS |
| IL1RL1- | 524 | EVQLLESGGGLVQPGGSLRLSCAASGFTFNSYAMSWVRQAPGKGLEWV |
| 223 | | SGITRSGSTNYRDSVKGRFTISRDNSKNTLYLQMNSLRAEDTAVYYCAK |
| | | AVRNFAFDYWGQGTLVTVSS |
| IL1RL1- | 525 | EVQLLESGGGLVQPGGSLRLSCAASGFTFSVYSMNWVRQAPGKGLEWV |
| 224 | | SGITRSGSTNYRDSVKGRFTISRDNSKNTLYLQMNSLRAEDTAVYYCAK |
| | | SGTRIKQGFDYWGQGTLVTVSS |
| IL1RL1- | 526 | EVQLLESGGGLVQPGGSLRLSCAASGFTFHKYGMAWVRQAPGKGLEW |
| 225 | | VATISGGGINTYYPDSVKGRFTISRDNSKNTLYLQMNSLRAEDTAVYYC |
| | | AKGTTRFDYWGQGTLVTVSS |
| IL1RL1- | 527 | EVQLLESGGGLVQPGGSLRLSCAASGFTFSRYFMGWVRQAPGKGLEWV |
| 226 | | SSIRGSSSSTYYADSVKGRFTISRDNSKNTLYLQMNSLRAEDTAVYYCAK |
| | | QKTSQSGAFDYWGQGTLVTVSS |
| IL1RL1- | 528 | EVQLLESGGGLVQPGGSLRLSCAASGFTLSSYAMSWVRQAPGKGLEWV |
| 227 | | SSIGRHGGRTYYADSVKGRFTISRDNSKNTLYLQMNSLRAEDTAVYYCA |
| | | KRTRSKFDYWGQGTLVTVSS |
| IL1RL1- | 529 | EVQLLESGGGLVQPGGSLRLSCAASGFTFSRYAMNWVRQAPGKGLEWV |
| 228 | | GYISNSGSTSYNDSVKGRFTISRDNSKNTLYLQMNSLRAEDTAVYYCAR |
| | | GRLFDYWGQGTLVTVSS |
| IL1RL1- | 530 | EVQLLESGGGLVQPGGSLRLSCAASGFTFDRYRMMWVRQAPGKGLEW |
| 229 | | VSSISGSSGTTYYADSVKGRFTISRDNSKNTLYLQMNSLRAEDTAVYYC |
| | | ARIRVGPSGGAFDYWGQGTLVTVSS |
| IL1RL1- | 531 | EVQLLESGGGLVQPGGSLRLSCAASGFTFSGYIMAWVRQAPGKGLEWV |
| 230 | | SSISSTGFKTYYADSVKGRFTISRDNSKNTLYLQMNSLRAEDTAVYYCA |
| | | KGNSRYVFDYWGQGTLVTVSS |
| IL1RL1- | 532 | EVQLLESGGGLVQPGGSLRLSCAASGFTFSNYGMSWVRQAPGKGLEWV |
| 231 | | SSIRGSSSSTYYADSVKGRFTISRDNSKNTLYLQMNSLRAEDTAVYYCAK |
| | | AYYGGFDYWGQGTLVTVSS |
| IL1RL1- | 533 | EVQLLESGGGLVQPGGSLRLSCAASGFTFETYQMWWVRQAPGKGLEW |
| 232 | | VSSIHPKGYPTRYADSVKGRFTISRDNSKNTLYLQMNSLRAEDTAVYYC |
| | | AKPGLKFDYWGQGTLVTVSS |
| IL1RL1- | 534 | EVQLLESGGGLVQPGGSLRLSCAASGFTFSRYHMEWVRQAPGKGLEWV |
| 233 | | SAISGSGDKTYYADSVKGRFTISRDNSKNTLYLQMNSLRAEDTAVYYCA |
| | | KGLRRFDYWGQGTLVTVSS |
| IL1RL1- | 535 | EVQLLESGGGLVQPGGSLRLSCAASGFTFSKYQMTWVRQAPGKGLEWV |
| 234 | | SAITGSGGSTYYADSVKGRFTISRDNSKNTLYLQMNSLRAEDTAVYYCA |
| | | KTSPRVPLDYWGQGTLVTVSS |
| IL1RL1- | 536 | EVQLLESGGGLVQPGGSLRLSCAASGFTFRRYVMGWVRQAPGKGLEWV |
| 235 | | SSISGSSGTTYYADSVKGRFTISRDNSKNTLYLQMNSLRAEDTAMYYCA |
| | | KSNGRFDYWGQGTLVTVSS |
| IL1RL1- | 537 | EVQLLESGGGLVQPGGSLRLSCAASGFTFAHEPMVWVRQAPGKGLEWV |
| 236 | | SGITRSGSTNYRDSVKGRFTISRDNSKNTLYLQMNSLRAEDTAVYYCAK |
| | | GARRFDYWGQGTLVTVSS |
| IL1RL1- | 538 | EVQLLESGGGLVQPGGSLRLSCAASGFTFGTYYMGWVRQAPGKGLEWV |
| 237 | | SAISGSGDKTYYADSVKGRFTISRDNSKNTLYLQMNSLRAEDTAVYYCA |
| | | KRLASRSHFDYWGQGTLVTVSS |
| IL1RL1- | 539 | EVQLLESGGGLVQPGGSLRLSCAASGFTFEGYPMSWVRQAPGKGLEWV |
| 238 | | SQISETGRRTYYADSVKGRFTTSRDNSKNTLYLQMNSLRAEDTAVYYCA |
| | | KGGGRPYNPFDYWGQGTLVTVSS |
| IL1RL1- | 540 | EVQLLESGGGLVQPGGSLRLSCAASGFTFRRYVMGWVRQAPGKGLEWV |
| 239 | | SSISGSSGTTYYADSVKGRFTISRDNSKNTLYLQMNSLRAEDTAVYYCA |
| | | KAYYGGFDYWGQGTLVTVSS |
| IL1RL1- | 541 | EVQLLESGGGLVQPGGSLRLSCAASGFTFAKYKMWWVRQAPGKGLEW |
| 240 | | VSAISGSGDKTYYADSVKGRFTISRDNSKNTLYLQMNSLRAEDTAVYYC |
| | | AKLGRRFDYWGQGTLVTVSS |
| IL1RL1- | 542 | EVQLLESGGGLVQPGGSLRLSCAASGFTFDRYRMMWVRQAPGKGLEW |
| 241 | | VSAISGSGGNTYYADSVKGRFTISRDNSKNTLYLQMNSLRAEDTAVYYC |
| | | AKGARRFDYWGQGTLVTVSS |
| IL1RL1- | 543 | EVQLLESGGGLVQPGGSLRLSCAASGFTFRRYVMGWVRQAPGKGLEWV |
| 242 | | SGISSGGDTYYVDSVKGRFTISRDNSKNTLYLQMNSLRAEDTAVYYCAK |
| | | AGRKFDYWGQGTLVTVSS |
| IL1RL1- | 544 | EVQLLESGGGLVQPGGSLRLSCAASGFTFSNYGMSWVRQAPGKGLEWV |
| 243 | | SGITRSGSTNYRDSVKGRFTISRDNSKNTLYLQMNSLRAEDTAVYYCAR |
| | | GRLFDYWGQGTLVTVSS |
| IL1RL1- | 545 | EVQLLESGGGLVQPGGSLRLSCAASGYSISSGYHWAWVRQAPGKGLEW |
| 244 | | VSSIGRHGGRTYYADSVKGRFTISRDNSKNTLYLQMNSLRAEDTAVYYC |
| | | AKAYYGGFDYWGQGTLVTVSS |
| IL1RL1- | 546 | EVQLLESGGGLVQPGGSLRLSCAASGFTLSSYAMSWVRQAPGKGLEWV |
| 245 | | SGITRSGSTNYRDSVKGRFTISRDNSKNTLYLQMNSLRAEDTAVYYCAK |
| | | FPFTHGKFDYWGQGTLVTVSS |
| IL1RL1- | 547 | EVQLLESGGGLVQPGGSLRLSCAASGFTFSSYFMSWVRQAPGKGLEWVS |
| 246 | | AISREGRATYYADSVKGRFTISRDNSKNTLYLQMNSLRAEDTAVYYCAK |
| | | LPKRGPRFDYWGQGTLVTVSS |
| IL1RL1- | 548 | EVQLLESGGGLVQPGGSLRLSCAASGFTFSNYGVSWVRQAPGKGLEWV |
| 247 | | SGITRSGSTNYRDSVKGRFTISRDNSKNTLYLQMNSLRAEDTAVYYCAR |
| | | GPYGRYAALDYWGQGTLVTVSS |
| IL1RL1- | 549 | EVQLLESGGGLVQPGGSLRLSCAASGFTFSRYAMNWVRQAPGKGLEWV |
| 248 | | GKINYAGNTDYNDSVKGRFTISRDNSKNTLYLQMNSLRAEDTAVYYCA |
| | | RSKIAFDYWGQGTLVTVSS |
| IL1RL1- | 550 | EVQLLESGGGLVQPGGSLRLSCAASGFTFSRYFMGWVRQAPGKGLEWV |
| 249 | | GYISNSGSTSYNDSVKGRFTISRDNSKNTLYLQMNSLRAEDTAVYYCAR |
| | | GPYGRYAALDYWGQGTLVTVSS |
| IL1RL1- | 551 | EVQLLESGGGLVQPGGSLRLSCAASGFTFSDYDMSWVRQAPGKGLEWV |
| 250 | | SSISSTGFKTYYADSVKGRFTISRDNSKNTLYLQMNSLRAEDTAVYYCA |
| | | KRTRSKFDYWGQGTLVTVSS |
| IL1RL1- | 552 | EVQLLESGGGLVQPGGSLRLSCAASGFTFDRYRMMWVRQAPGKGLEW |
| 251 | | VSAISGSGGGTSYADSVKGRFTISRDNSKNTLYLQMNSLRAEDTAVYYC |
| | | ARGRLFDYWGQGTLVTVSS |
| IL1RL1- | 553 | EVQLLESGGGLVQPGGSLRLSCAASGFTFSRYHIEWVRQAPGKGLEWVS |
| 252 | | AISGRGDNTYYADSVKGRFTISRDNSKNTLYLQMNSLRAEDTAVYYCAR |
| | | HKGLQPLDYWGQGTLVTVSS |
| IL1RL1- | 554 | EVQLLESGGGLVQPGGSLRLSCAASGFTFSRYAMNWVRQAPGKGLEWV |
| 253 | | SAISGSGDKTYYADSVKGRFTISRDNSKNTLYLQMNSLRAEDTAVYYCA |
| | | KGLRRFDYWGQGTLVTVSS |
| IL1RL1- | 555 | EVQLLESGGGLVQPGGSLRLSCAASGFTFSNYGVSWVRQAPGKGLEWV |
| 254 | | SEISPSGKKKYYADSVKGRFTISRDNSKNTLYLQMNSLRAEDTAVYYCA |
| | | KHSYPTRGRHLFDYWGQGTLVTVSS |
| IL1RL1- | 556 | EVQLLESGGGLVQPGGSLRLSCAASGFTVDTYAMTWVRQAPGKGLEW |
| 255 | | VSSIGRHGGRTYYADSVKGRFTISRDNSKNTLYLQMNSLRAEDTAVYYC |
| | | AKRTRSKFDYWGQGTLVTVSS |
| IL1RL1- | 557 | EVQLLESGGGLVQPGGSLRLSCAASGFTFDRYRMTWVRQAPGKGLEWV |
| 256 | | SSIGANGAPTYYADSVKGRFTISRDNSKNTLYLQMNSLRAEDTAVYYCA |
| | | RGRLFDYWGQGTLVTVSS |
| IL1RL1- | 558 | EVQLLESGGGLVQPGGSLRLSCAASGFTFSPRRMSWVRQAPGKGLEWV |
| 257 | | SAITGSGGSTYYADSVKGRFTISRDNSKNTLYLQMNSLRAEDTAVYYCA |
| | | RGRLFDYWGQGTLVTVSS |
| IL1RL1- | 559 | EVQLLESGGGLVQPGGSLRLSCAASGFTFRRYVMGWVRQAPGKGLEWV |
| 258 | | SGIVSSGGLTGYADSVKGRFTISRDNSKNTLYLQMNSLRAEDTAVYYCA |
| | | RSYGGGFDYWGQGTLVTVSS |
| IL1RL1- | 560 | EVQLLESGGGLVQPGGSLRLSCAASGFTFSNYGMSWVRQAPGKGLEWV |
| 259 | | SAISGSGDKTYYADSVKGRFTISRDNSKNTLYLQMNSLRAEDTAVYYCA |
| | | RRSYFRRFDYWGQGTLVTVSS |
| IL1RL1- | 561 | EVQLLESGGGLVQPGGSLRLSCAASGFTFAKYKMWWVRQAPGKGLEW |
| 260 | | VSSISGSSGTTYYADSVKGRFTISRDNSKNTLYLQMNSLRAEDTAVYYC |
| | | ARGRLFDYWGQGTLVTVSS |
| IL1RL1- | 562 | EVQLLESGGGLVQPGGSLRLSCAASGFTYHKYGMAWVRQAPGKGLEW |
| 261 | | VSYISPIGPRTYYADSVKGRFTISRDNSKNTLYLQMNSLRAEDTAVYYCA |
| | | KVRYGWGAGAFDYWGQGTLVTVSS |
| IL1RL1- | 563 | EVQLLESGGGLVQPGGSLRLSCAASGFTFSRYAMNWVRQAPGKGLEWV |
| 262 | | SAISGSGGNTYYADSVKGRFTISRDNSKNTLYLQMNSLRAEDTAVYYCA |
| | | RVWRNSLDYWGQGTLVTVSS |
| IL1RL1- | 564 | EVQLLESGGGLVQPGGSLRLSCAASGFTLSSYAMSWVRQAPGKGLEWV |
| 263 | | STINQAGLRTYYADSVKGRFTISRDNSKNTLYLQMNSLRAEDTAVYYCA |
| | | KGARRFDYWGQGTLVTVSS |
| IL1RL1- | 565 | EVQLLESGGGLVQPGGSLRLSCAASGFTFKAYPIMWVRQAPGKGLEWV |
| 264 | | SAISGSGDKTYYADSVKGRFTISRDNSKNTLYLQMNSLRAEDTAVYYCA |
| | | KSNGRFDYWGQGTLVTVSS |
| IL1RL1- | 566 | EVQLLESGGGLVQPGGSLRLSCAASGFTFSRYHMEWVRQAPGKGLEWV |
| 265 | | SEISPSGGYTYYADSVKGRFTISRDNSKNTLYLQMNSLRAEDTAVYYCA |
| | | RLPKRGPRFDYWGQGTLVTVSS |
| IL1RL1- | 567 | EVQLLESGGGLVQPGGSLRLSCAASGFTFSNYGVSWVRQAPGKGLEWV |
| 266 | | SYISPIGPRTYYADSVKGRFTISRDNSKNTLYLQMNSLRAEDTAVYYCAK |
| | | GVRKGFDYWGQGTLVTVSS |
| IL1RL1- | 568 | EVQLLESGGGLVQPGGSLRLSCAASGFTFHKYGMAWVRQAPGKGLEW |
| 267 | | VSAISREGRATYYADSVKGRFTISRDNSKNTLYLQMNSLRAEDTAVYYC |
| | | AKQASRNSPFDYWGQGTLVTVSS |
| IL1RL1- | 569 | EVQLLESGGGLVQPGGSLRLSCAASGFTFEGYPMSWVRQAPGKGLEWV |
| 268 | | SSIRGSSSSTYYADSVKGRFTISRDNSKNTLYLQMNSLRAEDTAVYYCAK |
| | | GLGRFDYWGQGTLVTVSS |
| IL1RL1- | 570 | EVQLLESGGGLVQPGGSLRLSCAASGFTFDRYRMMWVRQAPGKGLEW |
| 269 | | VSAITGSGGSTYYADSVKGRFTISRDNSKNTLYLQMNSLRAEDTAVYYC |
| | | AKGLRRFDYWGQGTLVTVSS |
| IL1RL1- | 571 | EVQLLESGGGLVQPGGSLRLSCAASGFTFSRYFMGWVRQAPGKGLEWV |
| 270 | | SGITRSGSTNYRDSVKGRFTISRDNSKNTLYLQMNSLRAEDTAVYYCAK |
| | | GPGTRGDYWGQGTLVTVSS |
| IL1RL1- | 572 | EVQLLESGGGLVQPGGSLRLSCAASGFTFSNYGVSWVRQAPGKGLEWV |
| 271 | | SGIAHNGRNTYYADSVKGRFTISRDNSKNTLYLQMNSLRAEDTAVYYC |
| | | AKDYYYGSGIFDYWGQGTLVTVSS |
| IL1RL1- | 573 | EVQLLESGGGLVQPGGSLRLSCAASGFTFHKYGMAWVRQAPGKGLEW |
| 272 | | VSAISGSGDKTYYADSVKGRFTISRDNSKNTLYLQMNSLRAEDTAVYYC |
| | | AKQNSRYRFDYWGQGTLVTVSS |
| IL1RL1- | 574 | EVQLLESGGGLVQPGGSLRLSCAASGFTFRRYVMGWVRQAPGKGLEWV |
| 273 | | SSISGSSGTTYYADSVKGRFTISRDNSKNTLYLQMNSLRAEDTAVYYCAR |
| | | LIATLGTFDYWGQGTLVTVSS |
| IL1RL1- | 575 | EVQLLESGGGLVQPGGSLRLSCAASGFTFNKYPMMWVRQAPGKGLEW |
| 274 | | VSLIEVQGDRTYYADSVKGRFTISRDNSKNTLYLQMNSLRAEDTAVYYC |
| | | ARGRVGYAFDYWGQGTLVTVSS |
| IL1RL1- | 576 | EVQLLESGGGLVQPGGSLRLSCAASGFTFSNSYISWVRQAPGKGLEWVS |
| 275 | | GIYPSGGSTVYADSVKGRFTISRDNSKNTLYLQMNSLRAEDTAVYYCAR |
| | | GNYFDYWGQGTLVTVSS |
| IL1RL1- | 577 | EVQLLESGGGLVQPGGSLRLSCAASGFTFSRYFMGWVRQAPGKGLEWV |
| 276 | | SAISREGRATYYADSVKGRFTISRDNSKNTLYLQMNSLRAEDTAVYYCA |
| | | KISQFGSNAFDYWGQGTLVTVSS |
| IL1RL1- | 578 | EVQLLESGGGLVQPGGSLRLSCAASGFTFSSYFMSWVRQAPGKGLEWVS |
| 277 | | DIDQVGHATYYADSVKGRFTISRDNSKNTLYLQMNSLRAEDTAVYYCA |
| | | RVAFSGSFDYWGQGTLVTVSS |
| IL1RL1- | 579 | EVQLLESGGGLVQPGGSLRLSCAASGFTFSRYFMGWVRQAPGKGLEWV |
| 278 | | SAISREGRATYYADSVKGRFTISRDNSKNTLYLQMNSLRAEDTAVYYCA |
| | | KFRGRGFDYWGQGTLVTVSS |
| IL1RL1- | 580 | EVQLLESGGGLVQPGGSLRLSCAASGFTFSSYFMSWVRQAPGKGLEWVS |
| 279 | | AISREGRATYYADSVKGRFTISRDNSKNTLYLQMNSLRAEDTAVYYCAK |
| | | FRGRGFDYWGQGTLVTVSS |
| IL1RL1- | 581 | EVQLLESGGGLVQPGGSLRLSCAASGFTFSRYFMGWVRQAPGKGLEWV |
| 280 | | SAISREGRATYYADSVKGRFTISRDNSKNTLYLQMNSLRAEDTAVYYCA |
| | | KVRPFWGTFDYWGQGTLVTVSS |
| IL1RL1- | 582 | EVQLLESGGGLVQPGGSLRLSCAASGFTFGNYRMTWVRQAPGKGLEWV |
| 281 | | SAITGSGGSTYYADSVKGRFTISRDNSKNTLYLQMNSLRAEDTAVYYCA |
| | | KGLRRFDYWGQGTLVTVSS |
| IL1RL1- | 583 | EVQLLESGGGLVQPGGSLRLSCAASGFTFDRYRMMWVRQAPGKGLEW |
| 282 | | VSAISGRGDNTYYADSVKGRFTISRDNSKNTLYLQMNSLRAEDTAVYYC |
| | | ARIRVGPSGGAFDYWGQGTLVTVSS |
| IL1RL1- | 584 | EVQLLESGGGLVQPGGSLRLSCAASGFTFSRYFMGWVRQAPGKGLEWV |
| 283 | | SAISREGRATYYADSVKGRFTISRDNSKNTLYLQMNSLRAEDTAVYYCA |
| | | RVAFSGSFDYWGQGTLVTVSS |
| IL1RL1- | 585 | EVQLLESGGGLVQPGGSLRLSCAASGFTFSSYFMSWVRQAPGKGLEWVS |
| 284 | | AISREGRATYYADSVKGRFTISRDNSKNTLYLQMNSLRAEDTAVYYCAK |
| | | FRGRGFDYWGQGTLVTVSS |
| IL1RL1- | 586 | EVQLLESGGGLVQPGGSLRLSCAASGFTFSRYFMGWVRQAPGKGLEWV |
| 285 | | SAISREGRATYYADSVKGRFTISRDNSKNTLYLQMNSLRAEDTAVYYCA |
| | | RTATSGSRGYFDYWGQGTLVTVSS |
| IL1RL1- | 587 | EVQLLESGGGLVQPGGSLRLSCAASGFTFPVYNMAWVRQAPGKGLEWV |
| 286 | | SAISREGRATYYADSVKGRFTISRDNSKNTLYLQMNSLRAEDTAVYYCA |
| | | RGPYGRYAALDYWGQGTLVTVSS |
| IL1RL1- | 588 | EVQLLESGGGLVQPGGSLRLSCAASGFTFSKYQMTWVRQAPGKGLEWV |
| 287 | | SAITGSGGSTYYADSVKGRFTISRDNSKNTLYLQMNSLRAEDTAVYYCA |
| | | RVWRNSLDYWGQGTLVTVSS |
| IL1RL1- | 589 | EVQLLESGGGLVQPGGSLRLSCAASGFTFSRYFMGWVRQAPGKGLEWV |
| 288 | | SAISREGRATYYADSVKGRFTISRDNSKNTLYLQMNSLRAEDTAVYYCA |
| | | RVAFSGSFDYWGQGTLVTVSS |
| IL1RL1- | 590 | EVQLLESGGGLVQPGGSLRLSCAASGFTFSNYGMSWVRQAPGKGLEWV |
| 289 | | SSISGSSGTTYYADSVKGRFTISRDNSKNTLYLQMNSLRAEDTAVYYCA |
| | | KGWRRFDYWGQGTLVTVSS |
| IL1RL1- | 591 | EVQLLESGGGLVQPGGSLRLSCAASGFTFSRYAMNWVRQAPGKGLEWV |
| 290 | | GYINPSRGYTYYADSVKGRFTISRDNSKNTLYLQMNSLRAEDTAVYYCA |
| | | RGRLFDYWGQGTLVTVSS |
| IL1RL1- | 592 | EVQLLESGGGLVQPGGSLRLSCAASGFTFTHYSMGWVRQAPGKGLEWV |
| 291 | | SGITRSGSTNYRDSVKGRFTISRDNSKNTLYLQMNSLRAEDTAVYYCAK |
| | | AYYGGFDYWGQGTLVTVSS |
| IL1RL1- | 593 | EVQLLESGGGLVQPGGSLRLSCAASGFTFSRYFMGWVRQAPGKGLEWV |
| 292 | | SAISREGRATYYADSVKGRFTISRDNSKNTLYLQMNSLRAEDTAVYYCA |
| | | RTATSGSRGYFDYWGQGTLVTVSS |
| IL1RL1- | 594 | EVQLLESGGGLVQPGGSLRLSCAASGFTFSRYAMNWVRQAPGKGLEWV |
| 293 | | SSISGSSGTTYYADSVKGRFTISRDNSKNTLYLQMNSLRAEDTAVYYCA |
| | | KGVRKGFDYWGQGTLVTVSS |
| IL1RL1- | 595 | EVQLLESGGGLVQPGGSLRLSCAASGFTFEEKEMIWVRQAPGKGLEWVS |
| 294 | | GITRSGSTNYRDSVKGRFTISRDNSKNTLYLQMNSLRAEDTAVYYCARIR |
| | | VGPSGGAFDYWGQGTLVTVSS |
| IL1RL1- | 596 | EVQLLESGGGLVQPGGSLRLSCAASGFTFPVYNMAWVRQAPGKGLEWV |
| 295 | | SYITPKGDHYYADSVKGRFTISRDNSKNTLYLQMNSLRAEDTAVYYCAK |
| | | AGRKFDYWGQGTLVTVSS |
| IL1RL1- | 597 | EVQLLESGGGLVQPGGSLRLSCAASGFTFGNYAMAWVRQAPGKGLEW |
| 296 | | VSGITRSGSTNYRDSVKGRFTISRDNSKNTLYLQMNSLRAEDTAVYYCA |
| | | KSGRRFDYWGQGTLVTVSS |
| IL1RL1- | 598 | EVQLLESGGGLVQPGGSLRLSCAASGFTSNNFAMTWVRQAPGKGLEWV |
| 297 | | SIISPLGLSTYYADSVKGRFTISRDNSKNTLYLQMNSLRAEDTAVYYCAR |
| | | SYGGGFDYWGQGTLVTVSS |
| IL1RL1- | 599 | EVQLLESGGGLVQPGGSLRLSCAATGFTFSRYAMNWVRQAPGKGLEWV |
| 298 | | SYITPKGDHTYYADSVKGRFTISRDNSKNTLYLQMNSLRAEDTAVYYCA |
| | | RGNYFDYWGQGTLVTVSS |
| IL1RL1- | 600 | EVQLLESGGGLVQPGGFLRLSCAASGFTFRRYVMGWVRQAPGKGLEWV |
| 299 | | SSISGSSGTTYYADSVKGRFTISRDNSKNTLYLQMNSLRAEDTAVYYCAR |
| | | GNYFDYWGQGTLVTVSS |
| IL1RL1- | 601 | EVQLLESGGGLVQPGGSLRLSCAASGFTFAHESMVWVRQAPGKGLEWV |
| 300 | | SSISGYGSTTYYADSVKGRFTISRDNSKNTLYLQMNSLRAEDTAVYYCV |
| | | KNALRFDYWGQGTLVTVSS |
| IL1RL1- | 602 | EVQLLESGGGLVQPGGSLRLSCAASGFTFSNYGVSWVRQAPGKGLEWV |
| 301 | | SEISPSGKKKYYADSVKGRFTISRDNSKNTLYLQMNSLRAEDTAVYYCA |
| | | RIRVGPSGGAFDYWGQGTLVTVSS |
| IL1RL1- | 603 | EVQLLESGGGLVQPGGSLRLSCAASGFTFAHEPMVWVRQAPGKGLEWV |
| 302 | | SSISGSSGTTYYADSVKGRFTISRDNSKNTLYLQMNSLRAEDTAVYYCA |
| | | KGLRRFDYWGQGTLVTVSS |
| IL1RL1- | 604 | EVQLLESGGGLVQPGGSLRLSCAASGFTFSRYAMNWVRQAPGKGLEWV |
| 303 | | SEISPSGKKKYYADSVKGRFTISRDNSKNTLYLQMNSLRAEDTAVYYCA |
| | | KRTRSKFDYWGQGTLVTVSS |
| IL1RL1- | 605 | EVQLLESGGGLVQPGGSLRLSCAASGFTFSNSYISWVRQAPGKGLEWVS |
| 304 | | SIWPRGQKTYYADSVKGRFTISRDNSKNTLYLQMNSLRAEDTAVYYCA |
| | | KAGRKFDYWGQGTLVTVSS |
| IL1RL1- | 606 | EVQLLESGGGLVQPGGSLRLSCAASGFTFRSYTMGWVRQAPGKGLEWV |
| 305 | | SGITRSGSTNYRDSVKGRFTISRDNSKNTLYLQMNSLRAEDTAVYYCAK |
| | | AYYGGFDYWGQGTLVTVSS |
| IL1RL1- | 607 | EVQLLESGGGLVQPGGSLRLSCAASGFTFSRYFMGWVRQAPGKGLEWV |
| 306 | | SAISREGRATYYADSVKGRFTISRDNSKNTLYLQMNSLRAEDTAVYYCA |
| | | RVAFSGSFDYWGQGTLVTVSS |
| IL1RL1- | 608 | EVQLLESGGGLVQPGGSLRLSCAASGFTFHKYGMAWVRQAPGKGLEW |
| 307 | | VSDIGASGSATSYADSVKGRFTISRDNSKNTLYLQMNSLRAEDTAVYYC |
| | | ARGRLFDYWGQGTLVTVSS |
| IL1RL1- | 609 | EVQLLESGGGLVQPGGSLRLSCAASGFTFSRYFMGWVRQAPGKGLEWV |
| 308 | | SAISREGRATYYADSVKGRFTISRDNSKNTLYLQMNSLRAEDTAVYYCA |
| | | RIHSGSYYFDYWGQGTLVTVSS |
| IL1RL1- | 610 | EVQLLESGGGLVQPGGSLRLSCAASGFTFSSYFMSWVRQAPGKGLEWVS |
| 309 | | AISGNGGSTFYADSVKGRFTISRDNSKNTLYLQMNSLRAEDTAVYYCAR |
| | | GRLFDYWGQGTLVTVSS |
| IL1RL1- | 611 | EVQLLESGGGLVQPGGSLRLSCAASGFTSNNFAMTWVRQAPGKGLEWV |
| 310 | | STINQAGLRTYYADSVKGRFTISRDNSKNTLYLQMNSLRAEDTAVYYCA |
| | | RGRVGYAFDYWGQGTLVTVSS |
| IL1RL1- | 612 | EVQLLESGGGLVQPGGSLRLSCAASGFTFSRYFMGWVRQAPGKGLEWV |
| 311 | | SAISREGRATYYADSVKGRFTISRDNSKNTLYLQMNSLRAEDTAVYYCA |
| | | KFRQYSGGFDYWGQGTLVTVSS |
| IL1RL1- | 613 | EVQLLESGGGLVQPGGSLRLSCAASGFTFETYAMSWVRQAPGKGLEWV |
| 312 | | SSIGRHGGRTYYADSVKGRFTISRDNSKNTLYLQMNSLRAEDTAVYYCA |
| | | KGLRRFDYWGQGTLVTVSS |
| IL1RL1- | 614 | EVQLLESGGGLVQPGGSLRLSCAASGFTFSDYDIGWVRQAPGKGLEWVS |
| 313 | | TISPYGPVTYYADSVKGRFTISRDNSKNTLYLQMNSLRAEDTAVYYCAK |
| | | SGRRLDYWGQGTLVTVSS |
| IL1RL1- | 615 | EVQLLESGGGLVQPGGSLRLSCAASGFTFSRYAMSWVRQAPGKGLEWV |
| 314 | | SAISGNGGSTFYADSVKGRFTISRDNSKNTLYLQMNSLRAEDTAVYYCA |
| | | RGRLFDYWGQGTLVTVSS |
| IL1RL1- | 616 | EVQLLESGGGLVQPGGSLRLSCAASGFTFPVYNMAWVRQAPGKGLEWV |
| 315 | | SGITRSGSTNYRDSVKGRFTISRDNSKNTLYLQMNSLRAEDTAVYYCAR |
| | | VWRNHLDYWGQGTLVTVSS |
| IL1RL1- | 617 | EVQLLESGGGLVQPGGSLRLSCAASGFTFGTIPMSWVRQAPGKGLEWVS |
| 316 | | GITRSGSTNYRDSVKGRFTISRDNSKNTLYLQMNSLRADDTAVYYCAKG |
| | | WRRFDYWGQGTLVTVSS |
| IL1RL1- | 618 | EVQLLESGGGLVQPGGSLRLSCVASGFTFPVYNMAWVRQAPGKGLEWV |
| 317 | | SGIVSSGGLTGYADSVKGRFTISRDNSKNTLYLQMNSLRAEDTAVYYCA |
| | | KGLRYSSAWTFDYWGQGTLVTVSS |
| IL1RL1- | 619 | EVQLLESGGGLVQPGGSLRLSCAASGFTFSSYFMSWVRQAPGKGLEWVS |
| 318 | | AISREGRATYYADSVKGRFTISRDNSKNTLYLQMNSLRAEDTAVYYCAK |
| | | FRGRGFDYWGQGTLVTVSS |
| IL1RL1- | 620 | EVQLLESGGGLVQPGGSLRLSCAASGFTFDRYRMMWVRQAPGKGLEW |
| 319 | | VSSIWPRDQKTYYADSVKGRFTISRDNSKNTLYLQMNSLRAEDTAVYYC |
| | | AKWSSRAFDYWGQGTLVTVSS |
| IL1RL1- | 621 | EVQLLESGGGLVQPGGSLRLSCAASGFTFSNYGVSWVRQAPGKGLEWV |
| 320 | | SGITRSGSTNYRDSVKGRFTISRDNSKNTLYLQMNSLRAEDTAVYYCAK |
| | | GLRRFDYWGQGTLVTVSS |
| IL1RL1- | 622 | EVQLLESGGGLVQPGGSLRLSCAASGFTFGNYRMTWVRQAPGKGLEWV |
| 321 | | SSISGYGSTTYYADSVKGRFTISRDNSKNTLYLQMNSLRAEDTAVYYCA |
| | | KGVRKGFDYWGQGTLVTVSS |
| IL1RL1- | 623 | EVQLLESGGGLVQPGGSLRLSCAASGFTFSRYFMGWVRQAPGKGLEWV |
| 322 | | SAISREGRATYYADSVKGRFTISRDNSKNTLYLQMNSLRAEDTAVYYCA |
| | | RFQGYGGGFDYWGQGTLVTVSS |
| IL1RL1- | 624 | EVQLLESGGGLVQPGGSLRLSCAASGFTFGNYRMTWVRQAPGKGLEWV |
| 323 | | SAITGSGGSTYYADSVKGRFTISRDNSKNTLYLQMNSLRAEDTAVYYCA |
| | | KGLRRFDYWGQGTLVTVSS |
| IL1RL1- | 625 | EVQLLESGGGLVQPGGSLRLSCAASGFTFSNYGVSWVRQAPGKGLEWV |
| 324 | | SYIGPSGGKTYYADSVKGRFTISRDNSKNTLYLQMNSLRAEDTAVYYCA |
| | | KGVRKGFDYWGQGTLVTVSS |
| IL1RL1- | 626 | EVQLLESGGGLVQPGGSLRLSCAASGFTFRRYVMGWVRQAPGKGLEWV |
| 325 | | SSISGSSGTTYYADSVKGRFTISRDNSKNTLYLQMNSLRAEDTAVYYCAR |
| | | GRLFDYWGQGTLVTVSS |
| IL1RL1- | 627 | EVQLLESGGGLVQPGGSLRLSCAASGFTFSVYSMNWVRQAPGKGLEWV |
| 326 | | SGITRSGSTYRDSVKGRFTISRDNSKNTLYLQMNSLRAEDTAVYYCAKS |
| | | GTRIKQGFDYWGQGTLVTVSS |
| IL1RL1- | 628 | EVQLLESGGGLVQPGGSLRLSCAASGFTFSRYAMNWVRQAPGKGLEWV |
| 327 | | SSISGSGDKTYYADSVKGRFTISRDNSKNTLYLQMNSLRAEDTAVYYCA |
| | | KSGRRFDYWGQGTLVTVSS |
| IL1RL1- | 629 | EVQLLESGGGLVQPGGSLRLSCAASGFTFSRYFMGWVRQAPGKGLEWV |
| 328 | | SAISREGRATYYADSVKGRFTISRDNSKNTLYLQMNSLRAEDTAVYYCA |
| | | RVIAAAGAFDYWGQGTLVTVSS |
| IL1RL1- | 630 | EVQLLESGGGLVQPGGSLRLSCAASGFTFGNYRMTWVRQAPGKGLEWV |
| 329 | | SAIIGSGSNTYYADSVKGRFTISRDNSKNTLYLQMNSLRAEDTAVYYCA |
| | | RGRLFDYWGQGTLVTVSS |
| IL1RL1- | 631 | EVQLLESGGGLVQPGGSLRLSCAASGFTFGNYRMTWVRQAPGKGLEWV |
| 330 | | SSISGYGSTTYYADSVKGRFTISRDNSKNTLYLQMNSLRAEDTAVYYCA |
| | | RGRLFDYWGQGTLVTVSS |
| IL1RL1- | 632 | EVQLLESGGGLVQPGGSLRLSCAASGFTFDRYRMMWVRQAPGKGLEW |
| 331 | | VSAITGSGGSTYYADSVKGRFTISRDNSKNTLYLQMNSLRAEDTAVYYC |
| | | ARSYGGGFDYWGQGTLVTVSS |
| IL1RL1- | 633 | EVQLLESGGGLVQPGGSLRLSCAASGFTFSSYFMSWVRQAPGKGLEWVS |
| 332 | | AISREGRATYYADSVKGRFTISRDNSKNTLYLQMNSLRAEDTAVYYCAK |
| | | FRGRGFDYWGQGTLVTVSS |
| IL1RL1- | 634 | EVQLLESGGGLVQPGGSLRLSCAASGFTFSSYFMSWVRQAPGKGLEWVS |
| 333 | | AISGSGDKTYYADSVKGRFTISRDNSKNTLYLQMNSLRAEDTAVYYCAR |
| | | AGRILFDYWGQGTLVTVSS |
| IL1RL1- | 635 | EVQLLESGGGLVQPGGSLRLSCAASGFTFTHYSMGWVRQAPGKGLEWV |
| 334 | | SGITRSGSTNYRDSVKGRFTISRDNSKNTLYLQMNSLRAEDTAVYYCAK |
| | | KLSNGFDYWGQGTLVTVSS |
| IL1RL1- | 636 | EVQLLESGGGLVQPGGSLRLSCAASGFTFAKYKMWWVRQAPGKGLEW |
| 335 | | VSAISREGRATYYADSVKGRFTISRDNSKNTLYLQMNSLRAEDTAVYYC |
| | | ATRPSRGSSGWYGGDYRGQGTLVTVSS |
| IL1RL1- | 637 | EVQLLESGGGLVQPGGSLRLSCAASGFTFSSYFMSWVRQAPGKGLEWVS |
| 336 | | AISREGRATYYADSVKGRFTISRDNSKNTLYLQMNSLRAEDTAVYYCAK |
| | | ISQFGSNAFDYWGQGTLVTVSS |
| IL1RL1- | 638 | EVQLLESGGGLVQPGGSLRLSCAASGFTFNSYAMSWVRQAPGKGLEWV |
| 337 | | GYISNSGSTSYNDSVKGRFTISRDNSKNTLYLQMNSLRAEDTAVYYCARI |
| | | RVGPSGGAFDYWGQGTLVTVSS |
| IL1RL1- | 639 | EVQLLESGGGLVQPGGSLRLSCAASGFTFSNYGMSWVRQAPGKGLEWV |
| 338 | | GISNSGSTSYNDSVKGRFTISRDNSKNTLYLQMNSLRAEDTAVYYCAKN |
| | | RAKFDYWGQGTLVTVSS |
| IL1RL1- | 640 | EVQLLESGGGLVQPGGSLRLSCAASGFTFKSYGMHWVRQAPGKGLEWV |
| 339 | | SGITRSGSTNYRDSVKGRFTISRDNSKNTLYLQMNSLRAEDTAVYYCAK |
| | | GPGTRGDYWGQGTLVTVSS |
| IL1RL1- | 641 | EVQLLESGGGLVQPGGSLRLSCAASGFTFSRYFMGWVRQAPGKGLEWV |
| 340 | | SAISREGRATYYADSVKGRFTISRDNSKNTLYLQMNSLRAEDTAVYYCA |
| | | RVWRNHLDYWGQGTLVTVSS |
| IL1RL1- | 642 | EVQLLESGGGLVQPGGSLRLSCAASGFTFSRYAMNWVRQAPGKGLEWV |
| 341 | | SSISGSSGTTYYADSVKGRFTISRDNSKNTLYLQMNSLRAEDTAVYYCAR |
| | | SYGGGFDYWGQGTLVTVSS |
| IL1RL1- | 643 | EVQLLESGGGLVQPGGPLRLSCAASGFTFSRYAMNWVRQAPGKGLEWV |
| 342 | | SAITGSGGSTYYADSVKGRFTISRDNSKNTLYLQMNSLRAEDTAVYYCA |
| | | KGLRAFDYWGQGTLVTVSS |
| IL1RL1- | 644 | EVQLLESGGGLVQPGGSLRLSCAASGFTFRSYTMGWVRQAPGKGLEWV |
| 343 | | SSIHPKGYPTRYADSVKGRFTISRDNSKNTLYLQMNSLRAEDTAVYYCA |
| | | KAGRKFDYWGQGTLVTVSS |
| IL1RL1- | 645 | EVQLLESGGGLVQPGGSPRLSCAASGFTFKAYEMGWVRQAPGKGLEWV |
| 344 | | SGITRSGSTNYRDSVKGRFTISRDNSKNTLYLQMNSLRAEDTAVYYCAK |
| | | SGRRFDYWGQGTLVTVSS |
| IL1RL1- | 646 | EVQLLESGGGLVQPGGSLRLSCAASGFTFSSYFMSWVRQAPGKGLEWVS |
| 345 | | AISREGRATYYADSVKGRFTISRDNSKNTLYLQMNSLRAEDTAVYYCAK |
| | | GLRRFDYWGQGTLVTVSS |
| IL1RL1- | 647 | EVQLLESGGGLVQPGGSLRLSCAASGFTFHKYGMAWVRQAPGKGLEW |
| 346 | | VSSISGSSGTTYYADSVKGRFTISRDNSKNTLYLQMNSLRAEDTAVYYC |
| | | ARDLYRGFDYWGQGTLVTVSS |
| IL1RL1- | 648 | EVQLLESGGGLVQPGGSLRLSCAASGFTFSRYFMGWVRQAPGKGLEWV |
| 347 | | SDISRLSPYTNYADSVKGRFTISRDNSKNTLYLQMNSLRAEDTAVYYCA |
| | | RSYGGGFDYWGQGTLVTVSS |
| IL1RL1- | 649 | EVQLLESGGGLVQPGGSLRLSCAASGFTFSRYAMNWVRQAPGKGLEWV |
| 348 | | SGIYPSGGSTVYADSVKGRFTISRDNSKNTLYLQMNSLRAEDTAVYYCA |
| | | KAYYGGFDYWGQGTLVTVSS |
| IL1RL1- | 650 | EVQLLESGGGLVQPGGSLRLSCAASGFTFSSAAMSWVRQAPGKGLEWV |
| 349 | | SSIRGSSSSTYYADSVKGRFTISRDNSKNTLYLQMNSLRAEDTAVYYCAR |
| | | IRVGPSGGAFDYWGQGTLVTVSS |
| IL1RL1- | 651 | EVQLLESGGGLVQPGGSLRLSCAASGFTFSRYAMNWVRQAPGKGLEWV |
| 350 | | SAISGSGDKTYYADSVKGRFTISRDNSKNTLYLQMNSLRAEDTAVYYCA |
| | | KGLGRFDYWGQGTLVTVSS |
| IL1RL1- | 652 | EVQLLESGGGLVQPGGSLRLSCAASGFTFNSYAMSWVRQAPGKGLEWV |
| 351 | | GISNSGSTSYNDSVKGRFTISRDNSKNTLYLQMNSLRAEDTAVYYCAKG |
| | | LRRFDYWGQGTLVTVSS |
| IL1RL1- | 653 | EVQLLESGGGLVQPGGSLRLSCAASGFTFHKYGMAWVRQAPGKGLEW |
| 352 | | VSSISGSSGTTYYADSVKGRFTISRDNSKNTLYLQMNSLRAEDTAVYYC |
| | | AKAGRKFDYWGQGTLVTVSS |
| IL1RL1- | 654 | EVQLLESGGGLVQPGGSLRLSCAASGFTLSSYAMSWVRQAPGKGLEWV |
| 353 | | SGITRSGSTNYRDSVKGRFTISRDNSKNTLYLQMNSLRAEDTAVYYCAK |
| | | GLRRFDYWGQGTLVTVSS |
| IL1RL1- | 655 | EVQLLESGGGLVQPGGSLRLSCAASGFTFSSAAMSWVRQAPGKGLEWV |
| 354 | | SAISREGRATYYADSVKGRFTISRDNSKNTLYLQMNSLRAEDTAVYYCA |
| | | KGLRRFDYWGQGTLVTVSS |
| IL1RL1- | 656 | EVQLLESGGGLVQPGGSLRLSCAASGFTFSPRRMSWVRQAPGKGLEWV |
| 355 | | SAISGSGGGTSYADSVKGRFTISRDNSKNTLYLQMNSLRAEDTAVYYCA |
| | | RGNYFDYWGQGTLVTVSS |
| IL1RL1- | 657 | EVQLLESGGGLVQPGGSLRLSCAASGFTFGTIPMSWVRQAPGKGLEWVS |
| 356 | | AISGNGGSTFYADSVKGRFTISRDNSKNTLYLQMNSLRAEDTAVYYCAK |
| | | GRRRFDYWGQGTLVTVSS |
| IL1RL1- | 658 | EVQLLESGGGLVQPGGSLRLSCAASGFTFSSYFMSWVRQAPGKGLEWVS |
| 357 | | AISREGRATYYADSVKGRFTISRDNSKNTLYLQMNSLRAEDTAVYYCAK |
| | | HSYPTRGRHLFDYWGQGTLVTVSS |
| IL1RL1- | 659 | EVQLLESGGGLVQPGGSLRLSCAASGFTFRRYVMGWVRQAPGKGLEWV |
| 358 | | SSISGSSGTTYYADSVKGRFTISRDNSKNTLYLQMNSLRAEDTAVYYCAR |
| | | SYGGGFDYWGQGTLVTVSS |
| IL1RL1- | 660 | EVQLLESGGGLVQPGGSLRLSCAASGFTFGNYRMTWVRQAPGKGLEWV |
| 359 | | SAITGSGGSTYYADSVKGRFTISRDNSKNTLYLQMNSLRAEDTAVYYCA |
| | | KGLRRFDYWGQGTLVTVSS |
| IL1RL1- | 661 | EVQLLESGGGLVQPGGSLRLSCAASGFTFSNYGVSWVRQAPGKGLEWV |
| 360 | | SSISGYGSTTYYADSVKGRFTISRDNSKNTLYLQMNSLRAEDTAVYYCA |
| | | KGLRRFDYWGQGTLVTVSS |
| IL1RL1- | 662 | EVQLLESGGGLVQPGGSLRLSCAASGFTFRRYVMGWVRQAPGKGLEWV |
| 361 | | SGITRSGSTNYRDSVKGRFTISRDNSKNTLYLQMNSLRAEDTAVYYCAR |
| | | GRLFDYWGQGTLVTVSS |
| IL1RL1- | 663 | EVQLLESGGGLVQPGGSLRLSCAASGFTFSRYAMNWVRQAPGKGLEWV |
| 362 | | SDIGASGSATSYADSVKGRFTISRDNSKNTLYLQMNSLRAEDTAVYYCA |
| | | RIRVGPSGGAFDYWGQGTLVTVSS |
| IL1RL1- | 664 | EVQLLESGGGLVQPGGSLRLSCAASGFTFSRYAMNWVRQAPGKGLEWV |
| 363 | | SSISGSSGTTYYADSVKGRFTISRDNSKNTLYLQMNSLRAEDTAVYYCA |
| | | KGWRRFDYWGQGTLVTVSS |
| IL1RL1- | 665 | EVQLLESGGGLVQPGGSLRLSCAASGFTFHKYGMAWVRQAPGKGLEW |
| 364 | | VSAIEARGGGTYYADSVKGRFTISRDNSKNTLYLQMNSLRAEDTAVYYC |
| | | AKAYYGGFDYWGQGTLVTVSS |
| IL1RL1- | 666 | EVQLLESGGGLVQPGGSLRLSCAASGFTFSNSYISWVRQAPGKGLEWVS |
| 365 | | YITPKGDHTYYADSVKGRFTISRDNSKNTLYLQMNSLRAEDTAVYYCAR |
| | | GPYGRYAALDYWGQGTLVTVSS |
| IL1RL1- | 667 | EVQLLESGGGLVQPGGSLRLSCAASGFTFSRYAMNWVRQAPGKGLEWV |
| 366 | | SAISGSGDKTYYADSVKGRFTISRDNSKNTLYLQMNSLRAEDTAVYYCA |
| | | KGFRLFPRTFDYWGQGTLVTVSS |
| IL1RL1- | 668 | EVQLLESGGGLVQPGGSLRLSCAASGFTFDRYRMMWVRQAPGKGLEW |
| 367 | | VSAISGRGDNTYYADSVKGRFTISRDNSKNTLYLQMNSLRAEDTAVYYC |
| | | AKWFLKSFDYWGQGTLVTVSS |
| IL1RL1- | 669 | EVQLLESGGGLVQPGGSLRLSCAASGFTFGSSAMSWVRQAPGKGLEWV |
| 368 | | SEIRVGGGDTYYADSVKGRFTISRDNSKNTLYLQMNSLRAEDTAVYYCA |
| | | RIRVGPSGGAFDYWGQGTLVTVSS |
| IL1RL1- | 670 | EVQLLESGGGLVQPGGSLRLSCAASGFTFDRYRMMWVRQAPGKGLEW |
| 369 | | VGKINYAGNTDYNDSVKGRFTISRDNSKNTLYLQMNSLRAEDTAVYYC |
| | | AKGWLGNFDYWGQGTLVTVSS |
| IL1RL1- | 671 | EVQLLESGGGLVQPGGSLRLSCAASGFTFSSYFMSWVRQAPGKGLEWV |
| 370 | | GYINPSRGYTYYADSVKGRFTISRDNSKNTLYLQMNSLRAEDTAVYYCA |
| | | RGRLFDYWGQGTLVTVSS |
| IL1RL1- | 672 | EVQLLESGGGLVQPGGSLRLSCAASGFTFGNYRMTWVRQAPGKGLEWV |
| 371 | | SAITGSGGSTYYADSVKGRFTISRDNSKNTLYLQMNSLRAEDTAVYYCA |
| | | KGWRRFDYWGQGTLVTVSS |
| IL1RL1- | 673 | EVQLLESGGGLVQPGGSLRLSCAASGFTFKSYGMHWVRQAPGKGLEWV |
| 372 | | SAITGSGGSTYYADSVKGRFTISRDNSKNTLYLQMNSLRAEDTAVYYCA |
| | | KLGRRFDYWGQGTLVTVSS |
| IL1RL1- | 674 | EVQLLESGGGLVQPGGSLRLSCAASGFTFGNYRMTWVRQAPGKGLEWV |
| 373 | | SAISGSGGNTYYADSVKGRFTISRDNSKNTLYLQMNSLRAEDTAVYYCA |
| | | RSVLLDYWGQGTLVTVSS |
| IL1RL1- | 675 | EVQLLESGGGLVQPGGSLRLSCAASGFTFSNYATSWVRQAPGKGLEWV |
| 374 | | SSISGSGVDTYYADSVKGRFTISRDNSKNTLYLQMNSLRAEDTAVYYCA |
| | | RYRPGSYYNRGDVELDYWGQGTLVTVSS |
| IL1RL1- | 676 | EVQLLESGGGLVQPGGSLRLSCAASGFAFSSYAMSWVRQAPGKGLELVS |
| 375 | | AISGSGDTSYYADSVKGRFTISRDNSKNTLYLQMNSLRAEDTAVYYCAR |
| | | VRRWSNFDYWGQGTLVTVSS |
| IL1RL1- | 677 | EVQLLESGGGLVQPGGSLRLSCAASGFTFSNYAVNWVRQAPGKGLEWV |
| 376 | | SGISGSSGNTYYADSVKGRFTISRDNSKNTLYLQMNSLRAEDTAVYYCA |
| | | RGSRYSGYWGQGTLVTVSS |
| IL1RL1- | 678 | EVQLLESGGGLVRPGGSLRLSCAASGFTFRNFAMSWVRQAPGKGLEWV |
| 377 | | SSISGSGDTTYYADSVKGRFTISRDNSKNTLYLQMNSLRAEDTAVYYCA |
| | | RHKRGRVAVAFPMDVWGQGTLVTVSS |
| IL1RL1- | 679 | EVQLLESGGGLVQPGGSLRLSCAASGFTFGHYAMNWVRQAPGKGLEW |
| 378 | | VSGISGSGGRTYYADSVKGRFTISRDNSKNTLYLQMNSLRAEDTAVYYC |
| | | ARGRSQGDWGQGTLVTVSS |
| IL1RL1- | 680 | EVQLLESGGGLVQPGGSLRLSCAASGFTFSSSAMSWVRQAPGKGLEWVS |
| 379 | | AISGSVGSTYYADSVKGRFTISRDNSKNTLYLQMNSLRAEDTAVYYCAR |
| | | VPKFRLGGLDVWGQGTLVTVSS |
| IL1RL1- | 681 | EVQLLESGGGLVQPGGPLRLSCAASGFSFSKFAMSWVRQAPGKGLEWV |
| 380 | | SGISGSGGNTYYADSVKGRFTISRDNSKNTLYLQMNSLRAEDTAVYYCV |
| | | KGSRGSYRSSTLGPFKHWGQGTLVTVSS |
| IL1RL1- | 682 | EVQLLESGGGLVQPGGSLRLSCAASGFTSSNYAMTWVRQAPGKGLEWV |
| 381 | | SSIIGSGGGTYYADSVKGRFTISRDNSKNTLYLQMNSLRAEDTAVYYCA |
| | | RGIPRRKKGAGLFDYWGQGTLVTVSS |
| IL1RL1- | 683 | EVQLLESGGGLVQPGGSLRLSCAASGFTFSRHAMNWVRQAPGKGLEWV |
| 382 | | SAISGSGGSTKYADSVKGRFTISRDNSKNTLYLQMNSLRAEDTAVYYCA |
| | | RRGVRGGEIWGQGTMVTVSS |
| IL1RL1- | 684 | EVQLLESGGGLVQPGGSLRLSCAASGFTFPSYAMAWVRQAPGKGLEWV |
| 383 | | TAIRGSGGRTYYADSVKGRFTISRDNSKNTLYLQMNSLRAEDTAVYYCV |
| | | KGRGRAPRLGFDYWGQGTLVTVSS |
| IL1RL1- | 685 | EVQLLESGGGLVQPGGSLRLSCAASGFTFPSYAMAWVRQAPGKGLEWV |
| 384 | | SAIRGSGGRTYYADSVKGRFTISRDNSKNTLYLQMNSLRAEDTAVYYCV |
| | | KGRGRAPRLGFDYWGQGTLVTVSS |
| IL1RL1- | 686 | EVQLLESGGGLVQPGGSLRLSCAASGFTFNTFAMSWVRQAPGKGLELVS |
| 385 | | AISGSGGNTYYVDSVKGRFTISRDNSKNTLYLQMNSLRAEDTAVYYCAR |
| | | LGSGSSSSIDYWGQGTLVTVSS |
| IL1RL1- | 687 | EVQLLESGGGLVQPGGSLRLSCAASGFTFGSSAMNWVRQAPGKGLEWV |
| 386 | | SSISGSGGNTFYADSVKGRFTISRDNSKNTLYLQMNSLRAEDTAVYYCA |
| | | RGRRKVDYWGQGTLVTVSS |
| IL1RL1- | 688 | EVQLLESGGGLVQPGGSLRLSCAASGFTFNRYAMNWVRQAPGKGLEW |
| 387 | | VSTISASGGRTYYADSVKGRFTISRDNSKNTLYLQMNSLRAEDTAVYYC |
| | | ARGSLRLDTWGQGTLVTVSS |
| IL1RL1- | 689 | EVQLLESGGGLVQPGGSLRLSCAASGFTFSRFAMSWVRQAPGKGLEWV |
| 388 | | SGISGSSGNTYYADSVKGRFTISRDNSKNTLYLQMNSLRAEDTAVYYCA |
| | | REKRLPIRRRSGEPLGNYFDYWGQGTLVTVSS |
| IL1RL1- | 690 | EVQLLESGGGLVQPGGSLRLSCAASGFTFPSYAMAWVRQAPGKGLEWV |
| 389 | | SAIRGSGGRTYYADSVKGRFTISRDNSKNTLYLQMNSLRAEDTAVYYCV |
| | | KGRGRAPILGFDYWGQGTLVTVSS |
| IL1RL1- | 691 | EVQLLESGGGLVQPGGSLRLSCAASGFSFSRYAMNWVRQAPGKGLEWV |
| 390 | | SGISGSGGRTNYADSVKGRFTISRDNSKNTLYLQMNSLRAEDTAVYYCA |
| | | RRRVGGFDNWGQGTLVTVSS |
| IL1RL1- | 692 | EVQLLESGGGLVQPGGSLRLSCAASGFPFGSYAMSWVRQAPGKGLEWV |
| 391 | | TGISASGGRTYYADSVKGRFTISRDNSKNTLYLQMNSLRAEDTAVYYCA |
| | | RAPIRKGYTRGFDYWGQGTLVTVSS |
| IL1RL1- | 693 | EVQLLESGGGLVQPGGSLRLSCAASGFTFRSYAMNWVRQAPGKGLEWV |
| 392 | | TGISGSGGRTYYADSVKGRFTISRDNSKNTLYLQMNSLRAEDTAVYYCA |
| | | RHRAFDIWGQGTLVTVSS |
| IL1RL1- | 694 | EVQLLESGGGLVQPGGSLRLSCAASGFIFRSYAMSWVRQAPGKGLEWVS |
| 393 | | TISGSGGKTYYADSVKGRFTISRDNSKNTLYLQMNSLRAEDTAVYYCAR |
| | | GPLAGRSFDPWGQGTLVTVSS |
| IL1RL1- | 695 | EVQLLESGGGLVQPGGSLRLSCAASGFTFSRYTMSWVRQAPGKGLEWV |
| 394 | | STISGRGGSTYYADSVKGRFTISRDNSKNTLYLQMNSLRAEDTAVYYCA |
| | | RTRHYYGSRSSDYWGQGTLVTVSS |
| IL1RL1- | 696 | EVQLLESGGGLVQPGGSLRLSCAASGFTYSSYAMTWVRQAPGKGLEWV |
| 395 | | SDISGSGSSTYYADSVKGRFTISRDNSKNTLYLQMNSLRAEDTAVYYCA |
| | | RDARATIFGVKRTRAYPLDVWGQGTLVTVSS |
| IL1RL1- | 697 | EVQLLESGGGLVQPGGSLRLSCAASGFTFSNYAVNWVRQAPGKGLEWV |
| 396 | | SGISGSGAGTYYADSVKGRFTISRDNSKNTLYLQMNSLRAEDTAVYYCA |
| | | RHGYRRRDFDYWGQGTLVTVSS |
| IL1RL1- | 698 | EVQLLESGGGLVQPGGSLRLSCAASGFTFSRYTMSWVRQAPGKGLEWV |
| 397 | | STISGSGGRTYYADSVKGRFTISRDNSKNTLYLQMNSLRAEDTAVYYCA |
| | | RGRQQQTYWGQGTLVTVSS |
| IL1RL1- | 699 | EVQLLESGGGLVQPGGSLRLSCAASGFTFSNYAINWVRQAPGKGLEWVS |
| 398 | | IISGSGGITYYADSVKGRFTISRDNSKNTLYLQMNSLRAEDTAVYYCARG |
| | | PATAHFYSFDLWGQGTLVTVSS |
| IL1RL1- | 700 | EVQLLESGGGLVQPGGSLRLSCAASGFTFNRFAMSWVRQAPGKGLEWV |
| 399 | | SGISASGSSTYYADSVKGRFTISRDNSKNTLYLQMNSLRAEDTAVYYCA |
| | | RKRIMDVWGQGTLVTVSS |
| IL1RL1- | 701 | EVQLLESGGGLVQPGGSLRLSCAASGFSFSSYAMSWVRQAPGKGLEWV |
| 400 | | SAISGSGGGTSYADSVKGRFTISRDNSKNTLYLQMNSLRAEDTAVYYCA |
| | | KGGPHCGGDCYIDHWGQGTLVTVSS |
| IL1RL1- | 702 | EVQLLESGGGLVQPGGSLRLSCAASGFTFSRNTMSWVRQAPGKGLEWV |
| 401 | | SAISASGRSTYYADSVKGRFTISRDNSKNTLYLQMNSLRAEDTAVYYCA |
| | | RGNSALYNWGQGTLVTVSS |
| IL1RL1- | 703 | EVQLLESGGGLVQPGGSLRLSCAASGFIFSRYAMSWVRQAPGKGLEWVS |
| 402 | | AISGAGGSTYYADSVKGRFTISRDNSKNTLYLQMNSLRAEDTAVYYCAR |
| | | VQRYTFDIWGQGTLVTVSS |
| IL1RL1- | 704 | EVQLLESGGGLVQPGGSLRLSCAASGFTFSRYSMSWVRQAPGKGLEWV |
| 403 | | SGISGSGDRTYYADSVKGRFTISRDNSKNTLYLQMNSLRAEDTAVYYCA |
| | | RGRRFDPWGQGTLVTVSS |
| IL1RL1- | 705 | EVQLLESGGGLVQPGGSLRLSCAASGFTFYNYAMSWVRQAPGKGLEWV |
| 404 | | SAISGSGSSTFYADSVKGRFTISRDNSKNTLYLQMNSLRAEDTAVYYCAR |
| | | LRADHSSATHYFDLWGQGTLVTVSS |
| IL1RL1- | 706 | EVQLLESGGGLVQPGGSLRLSCAASGFTYSSYAMTWVRQAPGKGLEWV |
| 405 | | SDISGSGSSTYYADSVKGRFTISRDNSKNTLYLQMNSLRAEDTAVYYCA |
| | | RVRRWSNFDYWGQGTLVTVSS |
| IL1RL1- | 707 | EVQLLESGGGLVQPGGSLRLSCAASGFTFRRYAMSWVRQAPGKGLEWV |
| 406 | | SGISGSSGNTYYADSVKGRFTISRDNSKNTLYLQMNSLRAEDTAVYYCV |
| | | TGRGNIWGQGTLVTVSS |
| IL1RL1- | 708 | EVQLLESGGGLVQPGGSLRLSCAASGFGFSSYAMSWVRQAPGKGLEWV |
| 407 | | SAISGSGGGTYYADSVKGRFTISRDNSKNTLYLQMNSLRAEDTAVYYCA |
| | | RVSRKMNYGINSWGQGTLVTVSS |
| IL1RL1- | 709 | EVQLLESGGGLVQPGGSLRLSCAASGFTFGRYAMSWVRQAPGKGLEWV |
| 408 | | SAISGSGGNTFYADSVKGRFTISRDNSKNTLYLQMNSLRAEDTAVYYCS |
| | | RGRYSSLDYWGQGTLVTVSS |
| IL1RL1- | 710 | EVQLLESGGGLVQPGGSLRLSCAASGFTSRSYAMNWVRQAPGKGLEWV |
| 409 | | SAISGSGSNTFYADSVKGRFTISRDNSKNTLYLQMNSLRAEDTAVYYCA |
| | | RDWGRYAKFDHWGQGTLVTVSS |
| IL1RL1- | 711 | EVQLLESGGGLVQPGGSLRLSCAASGFTFSRYAMSWVRQAPGKGLEWV |
| 410 | | STISGSGGSAFYADSVKGRFTISRDNSKNTLYLQMNSLRAEDTAVYYCA |
| | | RARHRPHTFDQWGQGTLVTVSS |
| IL1RL1- | 712 | EVQLLESGGGLVQPGGSLRLSCAASGFTFRNYAMGWVRQAPGKGLEW |
| 411 | | VSRISGSGGSTYYADSVKGRFTISRDNSKNTLYLQMNSLRAEDTAVYYC |
| | | ARGRGVAKAYWNFDLWGQGTLVTVSS |
| IL1RL1- | 713 | EVQLLESGGGLVQPGGSLRLSCAASGFSFSSYAMSWVRQAPGKGLEWV |
| 412 | | SGISGSGGRTNYADSVKGRFTISRDNSKNTLYLQMNSLRAEDTAVYYCA |
| | | RGLGHSSTWTHWGQGTLVTVSS |
| IL1RL1- | 714 | EVQLLESGGGLVQPGGSLRLSCAASGFSFSRYAMSWVRQAPGKGLEWV |
| 413 | | STISGSVGSTYYADSVKGRFTISRDNSKNTLYLQMNSLRAEDTAVYYCA |
| | | KGVGRVQGVMKDWGQGTLVTVSS |
| IL1RL1- | 715 | EVQLLESGGGLVQPGGSLRLSCAASGFSFSDFAMSWVRQAPGKGLEWV |
| 414 | | STFGGSGGSTYYADSVKGRFTISRDNSKNTLYLQMNSLRAEDTAVYYCA |
| | | RVRRWSNFDYWGQGTLVTVSS |
| IL1RL1- | 716 | EVQLLESGGGLVQPGGSLRLSCAASGFTFRRYAMSWVRQAPGKGLEWV |
| 415 | | SGISGSGYSTYYADSVKGRFTISRDNSKNTLYLQMNSLRAEDTAVYYCA |
| | | RGYRYSYGRKGAFDIWGQGTLVTVSS |
| IL1RL1- | 717 | EVQLLESGGGLVQPGGSLRLSCAASGFSFSSYAMSWVRQAPGKGLEWV |
| 416 | | SAISGSGGGTSYADSVKGRFTISRDNSKNTLYLQMNSLRAEDTAVYYCA |
| | | KGGPHCGGDCYIDHWGQGTLVTVSS |
| IL1RL1- | 718 | EVQLLESGGGLVQPGGSLRLSCAASGFTFTTYGMSWVRQAPGKGLEWV |
| 417 | | SAIRGSGGSTYYADSVKGRFTISRDNSKNTLYLQMNSLRAEDTAVYYCA |
| | | KDRTKGIAARFDYWGQGTLVTVSS |
| IL1RL1- | 719 | EVQLLESGGGLVQPGGSLRLSCAASGFTFSNYAINWVRQAPGKGLEWVS |
| 418 | | IISGSGGITYYADSVKGRFTISRDNSKNTLYLQMNSLRAEDTAVYYCARG |
| | | PATAHFYSFDLWGQGTLVTVSS |
| IL1RL1- | 720 | EVQLLESGGGLVQPGGSLRLSCAASGFKFSDYAMSWVRQAPGKGLEWV |
| 419 | | SGISGSGGRTHYADSVKGRFTISRDNSKNTLYLQMNSLRAEDTAVYYCA |
| | | RNSRRARAFDIWGQGTLVTVSS |
| IL1RL1- | 721 | EVQLLESGGGLVQPGGSLRLSCAASGFTFSRSSMSWVRQAPGKGLEWVS |
| 420 | | GISGSGGRTNYADSVKGRFTISRDNSKNTLYLQMNSLRAEDTAVYYCAR |
| | | GSRRGFDYWGQGTLVTVSS |
| IL1RL1- | 722 | EVQLLESGGGLVQPGGSLRLSCAASGFTFGRYAMSWVRQAPGKGLEWV |
| 421 | | SGISGSGSSTYYADSVKGRFTISRDNSKNTLYLQMNSLRAEDTAVYYCA |
| | | RRRGSIDYWGQGTLVTVSS |
| IL1RL1- | 723 | EVQLLESGGGLVQPGGSLRLSCAASGFSFSRYAMNWVRQAPGKGLEWV |
| 422 | | SGISSSGGGTYYADSVKGRFTISRDNSKNTLYLQMNSLRAEDTAVYYCA |
| | | RRNRGAMDVWGQGTLVTVSS |
| IL1RL1- | 724 | EVQLLESGGGLVQPGGSLRLSCAASGFTFRNYGMSWVRQAPGKGLEWV |
| 423 | | SAISGRGGNTYYADSVKGRFTISRDNSKNTLYLQMNSLRAEDTAVYYCA |
| | | RRRFNSSHSPRGAFDVWGQGTLVTVSS |
| IL1RL1- | 725 | EVQLLESGGGLVQPGGSLRLSCAASGFTYSNYAMSWVRQAPGKGLEWV |
| 424 | | SAISGSGGRTNYADSVKGRFTISRDNSKNTLYLQMNSLRAEDTAVYYCA |
| | | RGRSRFGYWGQGTLVTVSS |
| IL1RL1- | 726 | EVQLLESGGGLVQPGGSLRLSCAASGITFSRYAMSWVRQAPGKGLEWV |
| 425 | | SAISGTGGNTYYADSVKGRFTISRDNSKNTLYLQMNSLRAEDTAVYYCA |
| | | RTKRTQTSRKPIYGMDVWGQGTLVTVSS |
| IL1RL1- | 727 | EVQLLESGGGLVQPGGSLRLSCAASGFTFSRFAMSWVRQAPGKGLEWV |
| 426 | | SSISGSGGNTFYADSVKGRFTISRDNSKNTLYLQMNSLRAEDTAVYYCA |
| | | RGRRKVDYWGQGTLVTVSS |
| IL1RL1- | 728 | EVQLLESGGGLVQPGGSLRLSCAASGFTFGPYAMAWVRQAPGKGLEWV |
| 427 | | SVISGGGGYTYYADSVKGRFTISRDNSKNTLYLQMNSLRAEDTAVYYCA |
| | | RDRSVSWSGYYVPDAFDIWGQGTLVTVSS |
| IL1RL1- | 729 | EVQLLESGGGLVQPGGSLRLSCAASGLTFRTYAMSWVRQAPGKGLEWV |
| 428 | | SAISGSGRNTYYADSVKGRFTISRDNSKNTLYLQMNSLRAEDTAVYYCA |
| | | RAPYSGTRPGAFDFWGQGTLVTVSS |
| IL1RL1- | 730 | EVQLLESGGGLVQPGGSLRLSCAASGFTFRSYSMAWVRQAPGKGLEWV |
| 429 | | SAISGRGSSTYYADSVKGRFTISRDNSKNTLYLQMNSLRAEDTAVYYCV |
| | | RGDRSGWSEAFNMWGQGTLVTVSS |
| IL1RL1- | 731 | EVQLLESGGGLVQPGGSLRLSCAASGFTFSKHAMSWVRQAPGKGLEWV |
| 430 | | SAISGSGGRTYYADSVKGRFTISRDNSKNTLYLQMNSLRAEDTAVYYCA |
| | | KDHQDAFDIWGQGTLVTVSS |
| IL1RL1- | 732 | EVQLLESGGGLVQPGGSLRLSCAASGFPFGSYAMSWVRQAPGKGLEWV |
| 431 | | SGISASGGRTYYADSVKGRFTISRDNSKNTLYLQMNSLRAEDTAVYYCA |
| | | RAPIRKGYTRGFDYWGQGTLVTVSS |
| IL1RL1- | 733 | EVQLLESGGGLVQPGGPLRLSCAASGFTFITYAMNWVRQAPGKGLEWV |
| 432 | | SAISGRGGGTYYADSVKGRFTISRDNSKNTLYLQMNSLRAEDTAVYYCA |
| | | RPVDPSGSYYYAFDIWGQGTLVTVSS |
| IL1RL1- | 734 | EVQLLESGGGLVQPGGSLRLSCAASGFTFTNYAMGWVRQAPGKGLEWV |
| 433 | | SGISISGGSTYYADSVKGRFTISRDNSKNTLYLQMNSLRAEDTAVYYCAR |
| | | WSGHRSSFDSWGQGTPVTVSS |
| IL1RL1- | 735 | EVQLLESGGGLVQPGGSLRLSCAASGFTFGRYAMSWVRQAPGKGLEWV |
| 434 | | SAITGSGRSTYYADSVKGRFTISRDNSKNTLYLQMNSLRAGDTAVYYCA |
| | | RSRTMDVWGQGTLVTVSS |
| IL1RL1- | 736 | EVQLLESGGGLVQPGGSLRLSCAASGFTFSRYTMSWVRQAPGKGLEWV |
| 435 | | STISGSGGRTYYADSVKGRFTISRDNSKNTLYLQMNSLRAEDTAVYYCA |
| | | RGRQQQTYWGQGTLVTVSS |
| IL1RL1- | 737 | EVQLLESGGGLVQPGGSLRLSCAASGFTFSNYAVNWVRQAPGKGLEWV |
| 436 | | SGISGSGAGTYYADSVKGRFTISRDNSKNTLYLQMNSLRAEDTAVYYCA |
| | | RHGYRRRDFDYWGQGTLVTVSS |
| IL1RL1- | 738 | EVQLLESGGGLVQPGGSLRLSCAASGFMFSRYAMSWVRQAPGKGLEWV |
| 437 | | SGISGSGGKTYYADSVKGRFTISRDNSKNTLYLQMNSLRAEDTAVYYCA |
| | | RGRRLDVWGQGTLVTVSS |
| IL1RL1- | 739 | EVQLLESGGGLVQPGGSLRLSCAASGFRFSNYAMNWVRQAPGKGLEWV |
| 438 | | SGISGSGGRTYYADSVKGRFTISRDNSKNTLYLQMNSLRAEDTAVYYCA |
| | | RMMPRLRFFEYWGQGTLVTVSS |
| IL1RL1- | 740 | EVQLLESGGGLVQPGGSLRLSCAASGFTFRSYAMTWVRQSPGKGLEWV |
| 439 | | SGISGGGGSAYYADSVKGRFTISRDNSKNTLYLQMNSLRAEDTAVYYCA |
| | | RARARSRSFDYWGQGTLVTVSS |
| IL1RL1- | 741 | EVQLLESGGGLVQPGGSLRLSCAASGFTFSSYAMSWVRQAPGKGLEWV |
| 440 | | SGISGSGSSTFYADSVKGRFTISRDNSKNTLYLQMNSLRAEDTAVYYCAR |
| | | ERRSLNWIDSWGQGTLVTVSS |
| IL1RL1- | 742 | EVQLLESGGGLVQPGGSLRLSCAASGFSFSAYAMSWVRQAPGKGLEWV |
| 441 | | SVISGGGGATYYADSVKGRLTISRDNSKNTLYLQMNSLRAEDTAVYYCT |
| | | TDPREPRFFDPWGQGTLVTVSS |
| IL1RL1- | 743 | EVQLLESGGGLVQPGGSLRLSCAASGITFSRYAMSWVRQAPGKGLEWV |
| 442 | | SGISGSGGNTHYADSVKGRFTISRDNSKNTLYLQMNSLRAEDTAVYYCA |
| | | RDVRSGGRDVWGQGTLVTVSS |
| IL1RL1- | 744 | EVQLLESGGGLVQPGGSLRLSCAASGFTFSRYAMAWVRQAPGKGLEWV |
| 443 | | STISGSGTGTYYADSVKGRFTISRDNSKNTLYLQMNSLRAEDTAVYYCA |
| | | KARTGVVGPINYWGQGTLVTVSS |
| IL1RL1- | 745 | EVQLLESGGGLVQPGGSLRLSCAASGVTFRNYAMSWVRQAPGKGLEW |
| 444 | | VSTITGSGGSTYYADSVKGRFTISRDNSKNTLYLQMNSLRAEDTAVYYC |
| | | AKDGRVRGVLDYWGQGTLVTVSS |
| IL1RL1- | 746 | EVQLLESGGGLVQPGGSLRLSCAASGFTFNRYAMSWVRQAPGKGLEWV |
| 445 | | SSISGSGGNTFYADSVKGRFTISRDNSKNTLYLQMNSLRAEDTAVYYCA |
| | | KRKVSTNAFDIWGQGTLVTVSS |
| IL1RL1- | 747 | EVQLLESGGGLVQPGGSLRLSCAASGFTFKKYAMSWVRQAPGKGLEWV |
| 446 | | SAISGSGGNTYYADSVKGRFTISRDNTKNTLYLQMNSLRAEDTAVYYCA |
| | | RHRRGRTVAGPFDSWGQGTLVTVSS |
| IL1RL1- | 748 | EVQLLESGGGLVQPGGSLRLSCAASGFTFGNFAMSWVRQAPGKGLEWV |
| 447 | | SAISGRGGSTYYADSVKGRFTISRDNSKNTLYLQMNSLRAEDTAVYYCA |
| | | RVRRWSNFDYWGQGTLVTVSS |
| IL1RL1- | 749 | EVQLLESGGGLVQPGGSLRLSCAASGFAFSNYAMNWVRQAPGKGLEW |
| 448 | | VSAISGSGGTTFYADSVKGRFTISRDNSKNTLYLQMNSLRAEDTAVYYC |
| | | ARNRAGRRFDYWGQGTLVTVSS |
| IL1RL1- | 750 | EVQLLESGGGLVQPGGSLRLSCAASGFTFSRHAMSWVRQAPGKGLEWV |
| 449 | | SGISGPGGSTYYADSVKGRFTISRDNSKNTLYLQMNSLRAEDTAVYYCA |
| | | RMRARLGRGVNARRFDQWGQGTLVTVSS |
| IL1RL1- | 751 | EVQLLESGGGLVQPGGSLRLSCAASGFRFSNYAMNWVRQAPGKGPEWV |
| 450 | | SAISGRGGGASTYYADSVKGRFTISRDNSKNTLYLQMNSLRAEDTAVYY |
| | | CARRYGSHDYWGQGTLVTVSS |
| IL1RL1- | 752 | EVQLLESGGGLVQPGGSLRLSCAASGFRFSNYAMNWVRQAPGKGLEWV |
| 451 | | SAISGSGGTTYYADSVKGRFTISRDNSKNTLYLQMNSLRAEDTAVYYCA |
| | | RQRGAARPFDPWGQGTLVTVSS |
| IL1RL1- | 753 | EVQLLESGGGLVQPGGSLRLSCAASGFAFSRHAMSWVRQAPGKGLEWV |
| 452 | | SGISGSGGRTFYADSVKGRFTISRDNSKNTLYLQMNSLRAEDTAVYYCA |
| | | GHNARRTFGYWGQGTLVTVSS |
| IL1RL1- | 754 | EVQLLESGGGLVQPGGSLRLSCAASGFTYSSYAMTWVRQAPGKGLEWV |
| 453 | | SDISGSGSSTYYADSVKGRFTISRDNSKNTLYLQMNSLRAEDTAVYYCA |
| | | RDARATIFGVKRTRAYPLDVWGQGTLVTVSS |
| IL1RL1- | 755 | EVQLLESGGGLVQPGGSLRLSCAASGFTFSNRAMSWVRQAPGKGLEWV |
| 454 | | SAITGSGGSTYYADSVKGRFTISRDNSKNTLYLQMNSLRAEDTAVYYCV |
| | | RDARTRGYYYGSGTYNLWGQGTLVTVSS |
| IL1RL1- | 756 | EVQLLESGGGLVQPGGSLRLSCAASGFKFSSYAMTWVRQAPGKGLEWV |
| 455 | | STISGSGSNTYYADSVKGRFTISRDNSKNTLYLQMNSLRAEDTAVYYCA |
| | | RGRSGFNYGQYYFDHWGQGTLVTVSS |
| IL1RL1- | 757 | EVQLLESGGGLVQPGGSLRLSCAASGFTFTNYAMGWVRQAPGKGLEWV |
| 456 | | SGISGSGGSTYYTDSVKGRFTISRDNSKNTLYLQMNSLRAEDTAVYYCA |
| | | RGRRLDYWGQGTLVTVSS |
| IL1RL1- | 758 | EVQLLESGGGLVQPGGSLRLSCATSGFTISSYAMNWVRQAPGKGLEWVS |
| 457 | | AVSGSGGRTYYADSVKGRFTISRDNSKNTLYLQMNSLRAEDTAVYYCA |
| | | RGRGWLRYWGQGTLVTVSS |
| IL1RL1- | 759 | EVQLLESGGGLVQPGGSLRLSCAASGFTFSNYAINWVRQAPGKGLEWVS |
| 458 | | IISGSGGITYYADSVKGRFTISRDNSKNTLYLQMNSLRAEDTAVYYCARG |
| | | PATAHFYSFDLWGQGTLVTVSS |
| IL1RL1- | 760 | EVQLLESGGGLVQPGGSLRLSCAASGITFSRYAMSWVRQAPGKGLEWV |
| 459 | | STISGTGGATYYADSVKGRFTISRDNSKNTLYLQMNSLRAEDTAVYYCA |
| | | RSGRFGYYFDSWGQGTLVTVSS |
| IL1RL1- | 761 | EVQLLESGGGLVQPGGSLRLSCAASGLTVSSYAMSWVRQAPGKGLEWV |
| 460 | | SRISGSGGRTHYADSVKGRFTISRDNSKNTLYLQMNSLRAEDTAVYYCA |
| | | RAVAGTRGRAFDFWGQGTLVTVSS |
| IL1RL1- | 762 | EVQLLESGGGLVQPGGSLRLSCAASGFAFRSYAMNWVRQAPGKGLEWV |
| 461 | | SAISGSAGRTYYADSVKGRFTISRDNSKNTLYLQMNSLRAEDTAVYYCA |
| | | RGRTRFDPWGQGTLVTVSS |
| IL1RL1- | 763 | EVQLLESGGGLVQPGGSLRLSCAASGFTFNRFAMSWVRQAPGKGLEWV |
| 462 | | SGISASGSSTYYADSVKGRFTISRDNSKNTLYLQMNSLRAEDTAVYYCA |
| | | RKRIMDVWGQGTLVTVSS |
| IL1RL1- | 764 | EVQLLESGGGLVQPGGSLRLSCAASGFPFSNYAMGWVRQAPGKGLEWV |
| 463 | | SSITGSGGRTYYADSVKGRFTISRDNSKNTLYLQMNSLRAEDTAVYYCA |
| | | RRGSTWSRGRFDPWGQGTLVTVSS |
| IL1RL1- | 765 | EVQLLESGGGLVQPGGSLRLSCAASGFTFSHYAMPWVRQAPGKGLEWV |
| 464 | | SDISGSGATTYYADSVKGRFTISRDNSKNTLYLQMNSLRAEDTAVYYCT |
| | | TDYTMAPTFDYWGQGTLVTVSS |
| IL1RL1- | 766 | EVQLLESGGGLVQPGGSLRLSCAASGFPFSSYAMTWVRQAPGKGLEWV |
| 465 | | SAIRGSGGRTYYADSVKGRFTISRDNSKNTLYLQMNSLRAEDTAVYYCV |
| | | KGRGRAPRLGFDYWGQGTLVTVSS |
| IL1RL1- | 767 | EVQLLESGGGLVQPGGSLRLSCAASGFTFANYAMNWVRQAPGKGLEW |
| 466 | | VSTITGSGGATYYADSVKGRFTISRDNSKNTLYLQMNSLRAEDTAVYYC |
| | | AKEGWKTNRGPLRNWGQGTLVTVSS |
| IL1RL1- | 768 | EVQLLESGGGLVQPGGSLRLSCAASGFTFSNYAVSWVRQAPGKGLEWV |
| 467 | | SGISGTGGSTYYADSVKGRFTISRDNSKNTLYLQMNSLRAEDTAVYYCA |
| | | SRHASGTNYFMDVWGQGTLVTVSS |
| IL1RL1- | 769 | EVQLLESGGGLVQPGGSLRLSCAASGFTFSNRAMSWVRQAPGKGLEWV |
| 468 | | STIRGSGGSTYYADSVKGRFTISRDNSKNTLYLQMNSLRAEDTAVYYCA |
| | | RHMGSGWTPWGQGTLVTVSS |
| IL1RL1- | 770 | EVQLLESGGGLVQPGGSLRLSCAASGFPFGSYAMSWVRQAPGKGLEWV |
| 469 | | SGISASGGRTYYADSVKGRFTISRDNSKNTLYLQMNSLRAEDTAVYYCA |
| | | RAPIRKGYTRGFDYWGQGTLVTVSS |
| IL1RL1- | 771 | EVQLLESGGGLVQPGGSLRLSCAASGFGFSSYAMSWVRQAPGKGLEWV |
| 470 | | SAISGSGGGTYYADSVKGRFTISRDNSKNTLYLQMNSLRAEDTAVYYCA |
| | | RVSRKMNYGINSWGQGTLVTVSS |
| IL1RL1- | 772 | EVQLLESGGGLVQPGGSLRLSCAASGFTFGNYAMNWVRQAPGKGLEW |
| 471 | | VSAISGTGGTTYYDSVKGRFTISRDNSKNTLYLQMNSLRAEDTAVYYCT |
| | | TPNDYSNHNYYYGMDVWGQGTLVTVSS |
| IL1RL1- | 773 | EVQLLESGGGLVQPGGSLRLSCAASGFTFSTYVMTWVRQAPGKGLEWV |
| 472 | | SGISASGGSTHYADSVKGRFTISRDNSKNTLYLQMNSLRAEDTAVYYCA |
| | | KGMTALRNNWEPFDSWGQGTLVTVSS |
| IL1RL1- | 774 | EVQLLESGGGLVQPGGSLRLSCAASGFTFSNYAINWVRQAPGKGLEWVS |
| 473 | | IISGSGGITYYADSVKGRFTISRDNSKNTLYLQMNSLRAEDTAVYYCARG |
| | | PATAHFYSFDLWGQGTLVTVSS |
| IL1RL1- | 775 | EVQLLESGGGLVQPGGSLRLSCAASGFAFSRYAMSWVRQAPGKGLEWV |
| 474 | | SLISGSGGRTYYADSVKGRFTISRDNSKNTLYLQMNSLRAEDTAVYYCA |
| | | RSRSRGPLLDYWGQGTLVTVSS |
| IL1RL1- | 776 | EVQLLESGGGLVQPGGSLRLSCAASGFTISSYAMTWVRQAPGKGLEWVS |
| 475 | | AISGSGVSTDYADSVKGRFTISRDNSKNTLYLQMNSLRAEDTAVYYCAR |
| | | LSVARGAYGMDVWGQGTLVTVSS |
| IL1RL1- | 777 | EVQLLESGGGLVQPGGSLRLSCAASGIHFSNYAMTWVRQAPGKGLEWV |
| 476 | | SGISGSGGYTYYADSVKGRFTISRDNSKNTLYLQMNSLRAEDTAVYYCA |
| | | RLRWGSVTRAFDIWGQGTLVTVSS |
| IL1RL1- | 778 | EVQLLESGGGLVQPGGSLRLSCAASGFTFSRFAMTWVRQAPGKGLEWV |
| 477 | | SAISASGGDTYYADSVKGRFTISRDNSKNTLYLQMNSLRAEDTAVYYCA |
| | | TGSTSGRRFDYWGQGTLVTVSS |
| IL1RL1- | 779 | EVQLLESGGGLVQPGGSLRLSCAASGFAFRSYAMSWVRQAPGKGLEWV |
| 478 | | SDISGSGGRTYYADSVKGRFTISRDNSKNTLYLQMNSLRAEDTAVYYCA |
| | | RVRRDGYRAYYYVDVWGQGTLVTVSS |
| IL1RL1- | 780 | EVQLLESGGGLVQPGGSLRLSCAASGFTYSSYAMTWVRQAPGKGLEWV |
| 479 | | SAISASGVTTYYADSVKGRFTISRDNSKNTLYLQMNSLRAEDTAVYYCA |
| | | REDSSGYDNWFDPWGQGTLVTVSS |
| IL1RL1- | 781 | EVQLLESGGGLVQPGGSLRLSCAASGFSFSSYAMSWVRQAPGKGLEWV |
| 480 | | SAISGSGGGTSYADSVKGRFTISRDNSKNTLYLQMNSLRAEDTAVYYCA |
| | | RVRRWSNFDYWGQGTLVTVSS |
| IL1RL1- | 782 | EVQLLESGGGLVQPGGSLRLSCAASGFRFSNYAMSWVRQAPGKGLEWV |
| 481 | | STISGRGGSTNYADSVKGRFTISRDNSKNTLYLQMNSLRAEDTAVYYCA |
| | | RGWRSPGFWGQGTLVTVSS |
| IL1RL1- | 783 | EVQLLESGGGLVQPGGSLRLSCAASGFTITNYAMSWVRQAPGKGLEWV |
| 482 | | SGIRGSGGSTYYADSVKGRFTISRDNSKNTLYLQMNSLRAEDTAVYYCA |
| | | RSGKYKGRAFDIWGQGTLVTVSS |
| IL1RL1- | 784 | EVQLLESGGGLVQPGGSLRLSCAASGFTFRRSAMSWVRQAPGKGLEWV |
| 483 | | SGISGSGGSTHYADSVKGRFTISRDNSKNTLYLQMNSLRAEDTAVYYCA |
| | | RVRGLRGYFDFWGQGTLVTVSS |
| IL1RL1- | 785 | EVQLLESGGGLVQPGGSLRLSCAASGFTFGRYAMSWVRQAPGKGLEWV |
| 484 | | SSVSGSGGSTYYADSVKGRFTISRDNSKNTLYLQMNSQRAEDTAVYYCA |
| | | RSRGRGAWFDHWGQGTLVTVSS |
| IL1RL1- | 786 | EVQLLESGGGLVQPGGSLRLSCAASGFAFSSYAMSWVRQAPGKGLELVS |
| 485 | | AISGSGDTSYYADSVKGRFTISRDNSKNTLYLQMNSLRAEDTAVYYCAR |
| | | GRLWFRAWGQGTLVTVSS |
| IL1RL1- | 787 | EVQLLESGGGLVQPGGSLRLSCAASGFRFSNYAMNWVRQAPGKGLEWV |
| 486 | | SSISGSGGGTYYADSVKGRFTISRDNSKNTLYLQMNSLRAEDTAVYYCA |
| | | RPSRGYGMDVWGQGTLVTVSS |
| IL1RL1- | 788 | EVQLLESGGGLVQPGGSLRLSCAASGFTFKKYAMSWVRQAPGKGLEWV |
| 487 | | SSISGSAGSTYYADSVKGRFTISRDNSKNTLYLQMNSLRAEDTAVYYCA |
| | | KGRGMDVWGQGTLVTVSS |
| IL1RL1- | 789 | EVQLLESGGGLVQPGGSLRLSCAASGFSFSSYAMSWVRQAPGKGLEWV |
| 488 | | SAISGSGGGTSYADSVKGRFTISRDNSKNTLYLQMNSLRAEDTAVYYCA |
| | | KGGPHCGGDCYIDHWGQGTLVTVSS |
| IL1RL1- | 790 | EVQLLESGGGLVQPGGSLRLSCAASGIHLSSYAMSWVRQAPGKGLEWV |
| 489 | | SAVTGSGGSTYYADSVKGRFTISRDNSKNTLYLQMNSLRAEDTAVYYC |
| | | ARASSYPDYWGQGTLVTVSS |

TABLE 10
IL1RL2 Variable Heavy Chain Domain Sequences

| IL1RL2 | SEQ ID | |
|---|---|---|
| Variant | NO | VH Sequence |
| IL1RL2-1 | 791 | EVQLVESGGGLVQPGGSLRLSCAASGFIFSSYWMGWFRQAPGKEREFV |
| | | ATISWSGAYTEYADSVKGRFTISADNSKNTAYLQMNSLKPEDTAVYYC |
| | | AAANEYWVYVNPNRYTWGQGTLVTVSS |
| IL1RL2-2 | 792 | EVQLVESGGGLVQPGGSLRLSCAASGFTRSYYTMGWFRQAPGKERELV |
| | | ASITRGGGTTYADSVKGRFTISADNSKNTAYLQMNSLKPEDTAVYYCA |
| | | DVNGDWGQGTLVTVSS |
| IL1RL2-3 | 793 | EVQLVESGGGLVQPGGSLRLSCAASGRTVSTMGWFRQAPGKEREWVST |
| | | ITFNGDHTYYADSVKGRFTISADNSKNTAYLQMNSLKPEDTAVYYCAK |
| | | AYSSSWPYFDYWGQGTLVTVSS |
| IL1RL2-4 | 794 | EVQLVESGGGLVQPGGSLRLSCAASGFILREYNMGWFRQAPGKEREFV |
| | | AAISPSAFTEYADSVKGRFTISADNSKNTAYLQMNSLKPEDTAVYYCA |
| | | AANEYWVYVNPNRYTWGQGTLVTVSS |
| IL1RL2-5 | 795 | EVQLVESGGGLVQPGGSLRLSCAASGRTFDSYDMGWFRQAPGKERELV |
| | | ASITYLGRTNYADSVKGRFTISADNSKNTAYLQMNSLKPEDTAVYYCA |
| | | DVNGDWGQGTLVTVSS |
| IL1RL2-6 | 796 | EVQLVESGGGLVQPGGSLRLSCAASGGSFSGKDMGWFRQAPGKERELV |
| | | ATITYYADSVKGRFTISADNSKNTAYLQMNSLKPEDTAVYYCAKGADS |
| | | SIFYAVDVWGQGTLVTVSS |
| IL1RL2-7 | 797 | EVQLVESGGGLVQPGGSLRLSCAASGRTFSTYDMGWFRQAPGKERELV |
| | | ASITYLGRTNYADSVKGRFTISADNSKNTAYLQMNSLKPEDTAVYYCA |
| | | DINGDWGQGTLVTVSS |
| IL1RL2-8 | 798 | EVQLVESGGGLVQPGGSLRLSCAASGFTYSSNYMGWFRQAPGKEREFV |
| | | AGISWTDAYTEYADSVKGRFTISADNSKNTAYLQMNSLKPEDTAVYYC |
| | | AAANEYWVYVNPNRYTWGQGTLVTVSS |
| IL1RL2-9 | 799 | EVQLVESGGGLVQPGGSLRLSCAASGGSFSVKDMGWFRQAPGKEREFV |
| | | SSISGGTTYADSVKGRFTISADNSKNTAYLQMNSLKPEDTAVYYCAAI |
| | | AYEEGVYRWDWGQGTLVTVSS |
| IL1RL2-10 | 800 | EVQLVESGGGLVQPGGSLRLSCAASGFTFSNHIMGWFRQAPGKEREWV |
| | | SGINRDGSTSYADSVKGRFTISADNSKNTAYLQMNSLKPEDTAVYYCA |
| | | KARQITGWDFDYWGQGTLVTVSS |
| IL1RL2-11 | 801 | EVQLVESGGGLVQPGGSLRLSCAASGRTFSRYAMGWFRQAPGKEREFV |
| | | AAINWSGARTYYADSVKGRFTISADNSKNTAYLQMNSLKPEDTAVYYC |
| | | AVSQPLNYYTYYDARRYDWGQGTLVTVSS |
| IL1RL2-12 | 802 | EVQLVESGGGLVQPGGSLRLSCAASGPMSSSAVMGWFRQAPGKEREFV |
| | | AVVTRWSGARTVYADSVKGRFTISADNSKNTAYLQMNSLKPEDTAVYY |
| | | CAVSQPLNYYTYYDPRRYDWGQGTLVTVSS |
| IL1RL2-13 | 803 | EVQLVESGGGLVQPGGSLRLSCAASGYTDSNLWMGWFRQAPGKEREFV |
| | | GSIDWIPSNIYYADSVKGRFTISADNSKNTAYLQMNSLKPEDTAVYYC |
| | | AANGIESYGWGNRHFNWGQGTLVTVSS |
| IL1RL2-14 | 804 | EVQLVESGGGLVQPGGSLRLSCAASGFTFSNYWMGWFRQAPGKEREFV |
| | | ATIPWSGAYTEYADSVKGRFTISADNSKNTAYLQMNSLKPEDTAVYYC |
| | | AAANEYWVYVNPNRYTWGQGTLVTVSS |
| IL1RL2-15 | 805 | EVQLVESGGGLVQPGGSLRLSCAASGRTFSTYDMGWFRQAPGKEREFV |
| | | AVINYRGSTTYADSVKGRFTISADNSKNTAYLQMNSLKPEDTAVYYCA |
| | | DVNGDWGQGTLVTVSS |
| IL1RL2-16 | 806 | EVQLVESGGGLVQPGGSLRLSCAASGSDFSIKAMGWFRQAPGKEREFV |
| | | ADIYTSTTTNYTNYADSVKGRFTISADNSKNTAYLQMNSLKPEDTAVY |
| | | YCAAIAYEEGVYRWDWGQGTLVTVSS |
| IL1RL2-17 | 807 | EVQLVESGGGLVQPGGSLRLSCAASGRTFSTYDMGWFRQAPGKERELV |
| | | ASITFGGDTNYADSVKGRFTISADNSKNTAYLQMNSLKPEDTAVYYCA |
| | | DVNGDWGQGTLVTVSS |
| IL1RL2-18 | 808 | EVQLVESGGGLVQPGGSLRLSCAASGFTVSSYWMGWFRQEPGKERELV |
| | | AGINWESGSTHYADSVKGRFTISADNSKNTAYLQMNSLKPEDTAVYYC |
| | | TREYYYDSSGYSYWGQGTLVTVSS |
| IL1RL2-19 | 809 | EVQLVESGGGLVQPGGSLRLSCAASGYTDSNLWMGWFRQAPGKEREFV |
| | | ASVNWSGKDTYYADSVKGRFTISADNSKNTAYLQMNSLKPEDTAVYYC |
| | | AANGIESYGWGNRHFNWGQGTLVTVSS |
| IL1RL2-20 | 810 | EVQLVESGGGLVQPGGSLRLSCAASGRTGSTYDMGWFRQAPGKERELV |
| | | AAISWRGGSTYYADSVKGRFTISADNSKNTAYLQMNSLKPEDTAVYYC |
| | | ADVNGDWGQGTLVTVSS |
| IL1RL2-21 | 811 | EVQLVESGGGLVQPGGSLRLSCAASGRTFSRYAMGWFRQAPGKEREFV |
| | | AAINWSGDRTYYADSVKGRFTISADNSKNTAYLQMNSLKPEDTAVYYC |
| | | AVSQPLNYYTYYDARRYDWGQGTLVTVSS |
| IL1RL2-22 | 812 | EVQLVESGGGLVQPGGSLRLSCAASGRTFGSYAMGWFRQAPGKEREFV |
| | | AAINWSGARTYYADSVKGRFTISADNSKNTAYLQMNSLKPEDTAVYYC |
| | | AVSQPLNYYTYYDARRYDWGQGTLVTVSS |
| IL1RL2-23 | 813 | EVQLVESGGGLVQPGGSLRLSCAASGPTFSTYAMGWFRQAPGKEREFV |
| | | AAISWSGANTYYADSVKGRFTISADNSKNTAYLQMNSLKPEDTAVYYC |
| | | AVSQPLNYYTYYDARRYDWGQGTLVTVSS |
| IL1RL2-24 | 814 | EVQLVESGGGLVQPGGSLRLSCAASGRTFSTYDMGWFRQAPGKERELV |
| | | ASIVWIGGRTYYADSVKGRFTISADNSKNTAYLQMNSLKPEDTAVYYC |
| | | ADVNGDWGQGTLVTVSS |
| IL1RL2-25 | 815 | EVQLVESGGGLVQPGGSLRLSCAASGLPFNNVYMGWFRQAPGKEREFV |
| | | AAVTWSGAYTEYADSVKGRFTISADNSKNTAYLQMNSLKPEDTAVYYC |
| | | AAANEYWVYVNPNRYTWGQGTLVTVSS |
| IL1RL2-26 | 816 | EVQLVESGGGLVQPGGSLRLSCAASGSIFSIYDMGWFRQAPGKEREFV |
| | | AAISGWSGGRTSYADSVKGRFTISADNSKNTAYLQMNSLKPEDTAVYY |
| | | CAAIAYEEGVYRWDWGQGTLVTVSS |
| IL1RL2-27 | 817 | EVQLVESGGGLVQPGGSLRLSCAASGGRFSTYDMGWFRQAPGKEREFV |
| | | ASIVWIGGRTYYADSVKGRFTISADNSKNTAYLQMNSLKPEDTAVYYC |
| | | ADVNGDWGQGTLVTVSS |
| IL1RL2-28 | 818 | EVQLVESGGGLVQPGGSLRLSCAASGFTLNDYAMGWFRQAPGKEREWV |
| | | SSINWSGSTYYADSVKGRFTISADNSKNTAYLQMNSLKPEDTAVYYCA |
| | | KAYSSSWPYFDYWGQGTLVTVSS |
| IL1RL2-29 | 819 | EVQLVESGGGLVQPGGSLRLSCAASGGTFSAYTMGWFRQAPGKEREFV |
| | | AAISWSGGSTYYADSVKGRFTISADNSKNTAYLQMNSLKPEDTAVYYC |
| | | AVSQPLNYYTYYDARRYDWGQGTLVTVSS |
| IL1RL2-30 | 820 | EVQLVESGGGLVQPGGSLRLSCAASGGTLRGFDIGWFRQAPGKEREFV |
| | | AAVTWSGGSTNYADSVKGRFTISADNSKNTAYLQMNSLKPEDTAVYYC |
| | | ADVNGDWGQGTLVTVSS |
| IL1RL2-31 | 821 | EVQLVESGGGLVQPGGSLRLSCAASGRTFDSYDMGWFRQAPGKERELV |
| | | ASITFGGVTNYADSVKGRFTISADNSKNTAYLQMNSLKPEDTAVYYCA |
| | | DVNGDWGQGTLVTVSS |
| IL1RL2-32 | 822 | EVQLVESGGGLVQPGGSLRLSCAASGNDFSIKAMGWFRQAPGKEREFV |
| | | ADIYTSTTTNYTNYADSVKGRFTISADNSKNTAYLQMNSLKPEDTAVY |
| | | YCAAIAHEEGVYRWDWGQGTLVTVSS |
| IL1RL2-33 | 823 | EVQLVESGGGLVQPGGSLRLSCAASGRSFNLYYMGWFRQAPGKEREFV |
| | | ASIFTDDGDSYYADSVKGRFTISADNSKNTAYLQMNSLKPEDTAVYYC |
| | | AAGAGWAGTMTDYNWGQGTLVTVSS |
| IL1RL2-34 | 824 | EVQLVESGGGLVQPGGSLRLSCAASGRTSSTATMGWFRQAPGKEREFV |
| | | GSIDWIPSNIYYADSVKGRFTISADNSKNTAYLQMNSLKPEDTAVYYC |
| | | AAWGQDGWDGDWGQGTLVTVSS |
| IL1RL2-35 | 825 | EVQLVESGGGLVQPGGSLRLSCAASGRTFSTYDMGWFRQAPGKEREFV |
| | | AAISWSGGSTNYADSVKGRFTISADNSKNTAYLQMNSLKPEDTAVYYC |
| | | ADVNGDWGQGTLVTVSS |
| IL1RL2-36 | 826 | EVQLVESGGGLVQPGGSLRLSCAASGRTYNSYSMGWFRQAPGKEREFV |
| | | AAISWSGEHTYYADSVKGRFTISADNSKNTAYLQMNSLKPEDTAVYYC |
| | | AVSQPLNYYTYYDARRYDWGQGTLVTVSS |
| IL1RL2-37 | 827 | EVQLVESGGGLVQPGGSLRLSCAASGGAFSTVAMGWFRQAPGKEREFV |
| | | AAISWSRGRTFYADSVKGRFTISADNSKNTAYLQMNSLKPEDTAVYYC |
| | | AVSQPLNYYTYYDARRYDWGQGTLVTVSS |
| IL1RL2-38 | 828 | EVQLVESGGGLVQPGGSLRLSCAASGRSRYGMGWFRQAPGKEREFVAA |
| | | INWNGASTYYADSVKGRFTISADNSKNTAYLQMNSLKPEDTAVYYCAV |
| | | SQPLNYYTYYDARRYDWGQGTLVTVSS |
| IL1RL2-39 | 829 | EVQLVESGGGLVQPGGSLRLSCAASGRAFSSTVMGWFRQAPGKEREFV |
| | | AGIGWTDAYTEYADSVKGRFTISADNSKNTAYLQMNSLKPEDTAVYYC |
| | | AAANEYWVYVNPNRYTWGQGTLVTVSS |
| IL1RL2-40 | 830 | EVQLVESGGGLVQPGGSLRLSCAASGFTFSTYTMGWFRQAPGKEREFV |
| | | AGIAWNGASGTLTSYADSVKGRFTISADNSKNTAYLQMNSLKPEDTAV |
| | | YYCASAGRWGQGTLVTVSS |
| IL1RL2-41 | 831 | EVQLVESGGGLVQPGGSLRLSCAASGGTFSRYAMGWFRQAPGKEREFV |
| | | AAVNWSGARTYYADSVKGRFTISADNSKNTAYLQMNSLKPEDTAVYYC |
| | | AVSQPLNYYTYYDARRYDWGQGTLVTVSS |
| IL1RL2-42 | 832 | EVQLVESGGGLVQPGGSLRLSCAASGRTFSSYDMGWFRQAPGKEREFV |
| | | AAIVWIGGRTYYADSVKGRFTISADNSKNTAYLQMNSLKPEDTAVYYC |
| | | ADVNGDWGQGTLVTVSS |
| IL1RL2-43 | 833 | EVQLVESGGGLVQPGGSLRLSCAASGGTFSRYAMGWFRQAPGKEREFV |
| | | AAISWSGANTYYADSVKGRFTISADNSKNTAYLQMNSLKPEDTAVYYC |
| | | AVSQPLNYYTYYDARRYDWGQGTLVTVSS |
| IL1RL2-44 | 834 | EVQLVESGGGLVQPGGSLRLSCAASGRSFSTYDMGWFRQAPGKERELV |
| | | AAISWSGGSTYYADSVKGRFTISADNSKNTAYLQMNSLKPEDTAVYYC |
| | | ADVNGDWGQGTLVTVSS |
| IL1RL2-45 | 835 | EVQLVESGGGLVQPGGSLRLSCAASGFDFSVSWMGWFRQAPGKEREFV |
| | | GSIDWITTNIYYADSVKGRFTISADNSKNTAYLQMNSLKPEDTAVYYC |
| | | AANIEAGTTKSQGWGQGTLVTVSS |
| IL1RL2-46 | 836 | EVQLVESGGGLVQPGGSLRLSCAASGFTLGDYVMGWFRQAPGKEREFV |
| | | ATIRWGTTDTYYADSVKGRFTISADNSKNTAYLQMNSLKPEDTAVYYC |
| | | QSWYYDILTGYSDYYYMDVWGQGTLVTVSS |
| IL1RL2-47 | 837 | EVQLVESGGGLVQPGGSLRLSCAASGGTFSNYAMGWFRQAPGKEREFV |
| | | AAIGGVTDYADSVKGRFTISADNSKNTAYLQMNSLKPEDTAVYYCAAF |
| | | AYEEGVYRWDWGQGTLVTVSS |
| IL1RL2-48 | 838 | EVQLVESGGGLVQPGGSLRLSCAASGRTFSSYDMGWFRQAPGKERELV |
| | | AAITWNSGSTLYADSVKGRFTISADNSKNTAYLQMNSLKPEDTAVYYC |
| | | ADVNGDWGQGTLVTVSS |
| IL1RL2-49 | 839 | EVQLVESGGGLVQPGGSLRLSCAASGFTFSTYWMGWFRQAPGKEREFV |
| | | ATIPWIGAHTEYADSVKGRFTISADNSKNTAYLQMNSLKPEDTAVYYC |
| | | AEANEYWGYVNPNRYTWGPGTLVTVSH |
| IL1RL2-50 | 840 | EVQLVESGGGLVQPGGSLRLSCAASGSIFSIDAMGWFRQAPGKERESV |
| | | AIIKTDGSTYYADSVKGRFTISADNSKNTAYLQMNSLKPEDTAVYYCA |
| | | HRLGYCSGGSCYWPNYFDYWGQGTLVTVSS |
| IL1RL2-51 | 841 | EVQLVESGGGLVQPGGSLRLSCAASGFTFSPSWMGWFRQAPGKEREWV |
| | | SSIDYSAEDTYYADSVKGRFTISADNSKNTAYLQMNSLKPEDTAVYYC |
| | | AAFDGYSGSDWGQGTLVTVSS |
| IL1RL2-52 | 842 | EVQLVESGGGLVQPGGSLRLSCAASGRTSTYDMGWFRQAPGKEREFVG |
| | | AISWSGGLTSYADSVKGRFTISADNSKNTAYLQMNSLKPEDTAVYYCA |
| | | DVNGDWGQGTLVTVSS |
| IL1RL2-53 | 843 | EVQLVESGGGLVQPGGSLRLSCAASGSTFSPNVMGWFRQAPGKEREFV |
| | | AAITWSGSSTTEYADSVKGRFTISADNSKNTAYLQMNSLKPEDTAVYY |
| | | CAAANEYWVYVNPNRYTWGQGTLVTVSS |
| IL1RL2-54 | 844 | EVQLVESGGGLVQPGGSLRLSCAASGRYFSDYNMGWFRQAPGKEREFV |
| | | AAISPSAFTEYADSVKGRFTISADNSKNTAYLQMNSLKPEDTAVYYCA |
| | | AANEYWVYVNPNRYTWGQGTLVTVSS |
| IL1RL2-55 | 845 | EVQLVESGGGLVQPGGSLRLSCAASGYTDSNLWMGWFRQAPGKEREFV |
| | | ASIDWSGRSTYYADSVKGRFTISADNSKNTAYLQMNSLKPEDTAVYYC |
| | | AANGIESYGWGNRHFNWGQGTLVTVSS |
| IL1RL2-56 | 846 | EVQLVESGGGLVQPGGSLRLSCAASGRTFSTYDMGWFRQAPGKEREFV |
| | | AAISWGGGLTVYADSVKGRFTISADNSKNTAYLQMNSLKPEDTAVYYC |
| | | ADVNGDWGQGTLVTVSS |
| IL1RL2-57 | 847 | EVQLVESGGGLVQPGGSLRLSCAASGRAFSRYAMGWFRQAPGKEREFV |
| | | TAINWSGARTYYADSVKGRFTISADNSKNTAYLQMNSLKPEDTAVYYC |
| | | AVSQPLNYYTYYDARRYDWGQGTLVTVSS |
| IL1RL2-58 | 848 | EVQLVESGGGLVQPGGSLRLSCAASGLTAGTYAMGWFRQAPGKEREGV |
| | | AAIDWDGSRTQYADSVNGRFTISADNSKNTAYLQMNSLKPEDTAVYYC |
| | | AAIAYEEGVYRWDWGQGTLVTVSS |
| IL1RL2-59 | 849 | EVQLVESGGGLVQPGGSLRLSCAASGRTFSTYDMGWFRQAPGKERELV |
| | | ASITYLGRTYADSVKGRFTISADNSKNTAYLQMNSLKPEDTAVYYCAD |
| | | INGDWGQGTLVTVSS |
| IL1RL2-60 | 850 | EVQLVESGGGLVQPGGSLRLSCAASGRTFDSYDMGWFRQAPGKERELV |
| | | ASITYLGRTYADSVKGRFTISADNSKNTAYLQMNSLKPEDTAVYYCAD |
| | | VNGDWGQGTLVTVSS |
| IL1RL2-61 | 851 | EVQLVESGGGLVQPGGSLRLSCAASGNVFMIKDMGWFRQAPGKEREWV |
| | | ASISSGGTTAYADSVKGRFTISADNSKNTAYLQMNSLKPEDTAVYYCA |
| | | ARRWGYDWGQGTLVTVSS |
| IL1RL2-62 | 852 | EVQLVESGGGLVQPGGSLRLSCAASGRTFSSYDMGWFRQAPGKEREFV |
| | | AAITWSGGSTVYADSVKGRFTISADNSKNTAYLQMNSLKPEDTAVYYC |
| | | ADVNGDWGQGTLVTVSS |
| IL1RL2-63 | 853 | EVQLVESGGGLVQPGGSLRLSCAASGRTFSTYDMGWFRQAPGKERELV |
| | | ASITFGGVTNYADSVKGRFTISADNSKNTAYLQMNSLKPEDTAVYYCA |
| | | DVNGDWGQGTLVTVSS |
| IL1RL2-64 | 854 | EVQLVESGGGLVQPGGSLRLSCAASGVTLDLYAMGWFRQAPGKEREHV |
| | | AAISSSGVTTIYADSVKGRFTISADNSKNTAYLQMNSLKPEDTAVYYC |
| | | AAKPGWVARDPSQYNWGQGTLVTVSS |
| IL1RL2-65 | 855 | EVQLVESGGGLVQPGGSLRLSCAASGRTFSTYDMGWFRQAPGKERELV |
| | | ATINWSGVTAYADSVKGRFTISADNSKNTAYLQMNSLKPEDTAVYYCA |
| | | DVNGDWGQGTLVTVSS |
| IL1RL2-66 | 856 | EVQLVESGGGLVQPGGSLRLSCAASGRTFSTYDMGWFRQAPGKEREFV |
| | | AAITWNSGRTNYADSVKGRFTISADNSKNTAYLQMNSLKPEDTAVYYC |
| | | ADVNGDWGQGTLVTVSS |
| IL1RL2-67 | 857 | EVQLVESGGGLVQPGGSLRLSCAASGFTFSNHIMGWFRQAPGKEREWV |
| | | SGINRDGSTYADSVKGRFTISADNSKNTAYLQMNSLKPEDTAVYYCAK |
| | | ARQITGWDFDYWGQGTLVTVSS |
| IL1RL2-68 | 858 | EVQLVESGGGLVQPGGSLRLSCAASGSDFSIKAMGWFRQAPGKEREFV |
| | | ADIYTSTTTNYTNYADSVKGRFTISADNSKNTAYLQMNSLKPEDTAVY |
| | | YCADVNGDWGQGTLVTVSS |
| IL1RL2-69 | 859 | EVQLVESGGGLVQPGGSLRLSCAASGSDFSIKAMGWFRQAPGKEREFV |
| | | ADIYTSTTTNYTNYADSVKGRFTISADNSKNTAYLQMNSLKPEDTAVY |
| | | YCAAANEYWVYVNPNRYTWGQGTLVTVSS |
| IL1RL2-70 | 860 | EVQLVESGGGLVQPGGSLRLSCAASGTFDSYDMGWFRQAPGKERELVA |
| | | SITFGGVTNYADSVKGRFTISADNSKNTAYLQMNSLKPEDTAVYYCAD |
| | | VNGDWGQGTLVTVSS |
| IL1RL2-71 | 861 | EVQLVESGGGLVQPGGSLRLSCAASGFIFSSYWMGWFRQAPGKEREFV |
| | | ATISWSGAYTEYADSVKGRFTISADNSKNTAYLQMNSLKPEDTAVYYC |
| | | AAIAYEEGVYRWDWGQGTLVTVSS |
| IL1RL2-72 | 862 | EVQLVESGGGLVQPGGSLRLSCAASGFIFSSYWMGWFRQAPGKEREFV |
| | | ATISWSGAYTEYADSVKGRFTISADNSKNTAYLQMNSLKPEDTAVYYC |
| | | ADVNGDWGQGTLVTVSS |
| IL1RL2-73 | 863 | EVQLVESGGGLVQPGGSLRLSCAASGGTFSSYDMGWFRQAPGKERELV |
| | | ASISFLGHTTNYADSVKGRFTISADNSKNTAYLQMNSLKPEDTAVYYC |
| | | ADVNGDWGQGTLVTVSS |
| IL1RL2-74 | 864 | EVQLVESGGGLVQPGGSLRLSCAASGRTISSYDMGWFRQAPGKEREFV |
| | | ASIVWIGGRTYYADSVKGRFTISADNSKNTAYLQMNSLKPEDTAVYYC |
| | | ADVNGDWGQGTLVTVSS |
| IL1RL2-75 | 865 | EVQLVESGGGLVQPGGSLRLSCAASGRTFSTYDMGWFRQAPGKEREFV |
| | | AAITWNGASTSYADSVKGRFTISADNSKNTAYLQMNSLKPEDTAVYYC |
| | | ADVNGDWGQGTLVTVSS |
| IL1RL2-76 | 866 | EVQLVESGGGLVQPGGSLRLSCAASGLTFSPSAMGWFRQAPGKEREFV |
| | | AAISRFGSTYYADSVKGRFTISADNSKNTAYLQMNSLKPEDTAVYYCA |
| | | MSIVKSGGADWGQGTLVTVSS |
| IL1RL2-77 | 867 | EVQLVESGGGLVQPGGSLRLSCAASGLTFDDSAMGWFRQAPGKERELV |
| | | ALIHTGGGATYYADSVKGRFTISADNSKNTAYLQMNSLKPEDTAVYYC |
| | | ARDYGDWGYFDYWGQGTLVTVSS |
| IL1RL2-78 | 868 | EVQLVESGGGLVQPGGSLRLSCAASGGRFSTYDMGWFRQAPGKEREFV |
| | | ASIVWIGGRTYYADSVKGRFTISADNSKNTAYLQMNSLKPEDTAVYYC |
| | | AAIAYEEGVYRWDWGQGTLVTVSS |
| IL1RL2-79 | 869 | EVQLVESGGGLVQPGGSLRLSCAASGFTLSSNWMGWFRQAPGKEREWV |
| | | SSVDRDGGSTYYADSVKGRFTISADNSKNTAYLQMNSLKPEDTAVYYC |
| | | ASRVDDRVWGQGTLVTVSS |
| IL1RL2-80 | 870 | EVQLVESGGGLVQPGGSLRLSCAASGGSFSVKDMGWFRQAPGKEREFV |
| | | SSISGGTTYADSVKGRFTISADNSKNTAYLQMNSLKPEDTAVYYCADV |
| | | NGDWGQGTLVTVSS |
| IL1RL2-81 | 871 | EVQLVESGGGLVQPGGSLRLSCAASGRTFSTYDMGWFRQAPGKERELV |
| | | ASITYLGRTYADSVKGRFTISADNSKNTAYLQMNSLKPEDTAVYYCAD |
| | | VNGDWGQGTLVTVSS |
| IL1RL2-82 | 872 | EVQLVESGGGLVQPGGSLRLSCAASGGTFSTYDMGWFRQAPGKERELV |
| | | AAITWSGGSTVYADSVKGRFTISADNSKNTAYLQMNSLKPEDTAVYYC |
| | | ADVNGDWGQGTLVTVSS |
| IL1RL2-83 | 873 | EVQLVESGGGLVQPGGSLRLSCAASGTLHRFDMGWFRQAPGKEREFVA |
| | | SINWSGVNAYYADSVKGRFTISADNSKNTAYLQMNSLKPEDTAVYYCA |
| | | AIAHEEGVYRWDWGQGTLVTVSS |
| IL1RL2-84 | 874 | EVQLVESGGGLVQPGGSLRLSCAASGGSFSVKDMGWFRQAPGKEREFL |
| | | ASIRWNAKPYYADSVKGRFTISADNSKNTAYLQMNSLKPEDTAVYYCA |
| | | AIAYEEGVYRWDWGQGTLVTVSS |
| IL1RL2-85 | 875 | EVQLVESGGGLVQPGGSLRLSCAASGGSFSVKDMGWFRQAPGKEREFV |
| | | SSISGGTTYADSVKGRFTISADNSKNTAYLQMNSLKPEDTAVYYCAAA |
| | | NEYWVYVNPNRYTWGQGTLVTVSS |
| IL1RL2-86 | 876 | EVQLVESGGGLVQPGGSLRLSCAASGIAQSIRVMGWFRQAPGKEREFV |
| | | AAISRSGGNTWYADSVKGRFTISADNSKNTAYLQMNSLKPEDTAVYYC |
| | | ARDGGYLWWGQGTLVTVSS |
| IL1RL2-87 | 877 | EVQLVESGGGLVQPGGSLRLSCAASGRTFSTYDMGWFRQAPGKERELV |
| | | ASITYGGNTNYADSVKGRFTISADNSKNTAYLQMNSLKPEDTAVYYCA |
| | | DVNGDWGQGTLVTVSS |
| IL1RL2-88 | 878 | EVQLVESGGGLVQPGGSLRLSCAASGSIFRLSTMGWFRQAPGKEREGV |
| | | SGISSSDGSTTYADSVKGRFTISADNSKNTAYLQMNSLKPEDTAVYYC |
| | | AAQTEDSAQYIWGQGTLVTVSS |
| IL1RL2-89 | 879 | EVQLVESGGGLVQPGGSLRLSCAASGGIYRVNTMGWFRQAPGKEREFV |
| | | ASITSDDRTYADSVKGRFTISADNSKNTAYLQMNSLKPEDTAVYYCAQ |
| | | FAYSFYYFQYWGQGTLVTVSS |
| IL1RL2-90 | 880 | EVQLVESGGGLVQPGGSLRLSCAASGGRFSTYDMGWFRQAPGKEREFV |
| | | ASIVWIGGRTYYADSVKGRFTISADNSKNTAYLQMNSLKPEDTAVYYC |
| | | AAANEYWVYVNPNRYTWGQGTLVTVSS |
| IL1RL2-91 | 881 | EVQLVESGGGLVQPGGSLRLSCAASGGTFSDLAMGWFRQAPGKEREFV |
| | | AAISRSGGTTYYADSVKGRFTISADNSKNTAYLQMNSLKPEDTAVYYC |
| | | ARGSGYGDDYWGQGTLVTVSS |
| IL1RL2-92 | 882 | EVQLVESGGGLVQPGGSLRLSCAASGSTLRDYAMGWFRQAPGKEREFV |
| | | AAIRWSGGNTYYADSVKGRFTISADNSKNTAYLQMNSLKPEDTAVYYC |
| | | ARLWGRDVLGWGQGTLVTVSS |
| IL1RL2-93 | 883 | EVQLVESGGGLVQPGGSLRLSCAASGSDYRWMYMGWFRQAPGKEREFV |
| | | ASISGGGSTYYADSVKGRFTISADNSKNTAYLQMNSLKPEDTAVYYCA |
| | | SAGRWGQGTLVTVSS |
| IL1RL2-94 | 884 | EVQLVESGGGLVQPGGSLRLSCAASGLTFSLYRMGWFRQAPGKEREGV |
| | | ASIDSDGTTYADSVKGRFTISADNSKNTAYLQMNSLKPEDTAVYYCAR |
| | | EDYDFWKGYYQKYFQHWGQGTLVTVSS |
| IL1RL2-95 | 885 | EVQLVESGGGLVQPGGSLRLSCAASGPTFSTYAMGWFRQAPGKEREFV |
| | | AAINWSGARTYYADSVKGRFTISADNSKNTAYLQMNSLKPEDTAVYYC |
| | | AVSQPLNYYTYYDARRYDWGQGTLVTVSS |
| IL1RL2-96 | 886 | EVQLVESGGGLVQPGGSLRLSCAASGNDFSIKAMGWFRQAPGKEREFV |
| | | ADIYTSTTTNYTNYADSVKGRFTISADNSKNTAYLQMNSLKPEDTAVY |
| | | YCAAIAYEEGVYRWDWGQGTLVTVSS |
| IL1RL2-97 | 887 | EVQLVESGGGLVQPGGSLRLSCAASGITFRRYHMGWFRQAPGKEREFV |
| | | AAISPSAFTEYADSVKGRFTISADNSKNTAYLQMNSLKPEDTAVYYCA |
| | | AANEYWVYVNPNRYTWGQGTLVTVSS |
| IL1RL2-98 | 888 | EVQLVESGGGLVQPGGSLRLSCAASGGRTFSRYAMGWFRQAPGKEREF |
| | | VAHVSHDGYSMYADSVKGRFTISADNSKNTAYLQMNSLKPEDTAVYYC |
| | | ARDEGSWGYFDYWGQGTLVTVSS |
| IL1RL2-99 | 889 | EVQLVESGGGLVQPGGSLRLSCAASGSTFRTDMMGWFRQAPGKEREFV |
| | | ASIMTDGTYYADSVKGRFTISADNSKNTAYLQMNSLKPEDTAVYYCAV |
| | | VDLLRGKLWGQGTLVTVSS |
| IL1RL2- | 890 | EVQLVESGGGLVQPGGSLRLSCAASGVDFSRHVMGWFRQAPGKEREFV |
| 100 | | AAISRSGGSTYYADSVKGRFTISADNSKNTAYLQMNSLKPEDTAVYYC |
| | | ASALNGRLPGRWGQGTLVTVSS |
| IL1RL2- | 891 | EVQLVESGGGLVQPGGSLRLSCAASGGRSFSTYDMGWFRQAPGKEREF |
| 101 | | VAAIVWIGGRTYYADSVKGRFTISADNSKNTAYLQMNSLKPEDTAVYY |
| | | CADVNGDWGQGTLVTVSS |
| IL1RL2- | 892 | EVQLVESGGGLVQPGGSLRLSCAASGLTFSIYPMGWFRQAPGKEREFV |
| 102 | | ATISVSGDSTYYADSVKGRFTISADNSKNTAYLQMNSLKPEDTAVYYC |
| | | ARGYDFWSGYGNLDYWGQGTLVTVSS |
| IL1RL2- | 893 | EVQLVESGGGLVQPGGSLRLSCAASGRTFSTYDMGWFRQAPGKERELV |
| 103 | | ASIVWIGGRTYYADSVKGRFTISADNSKNTAYLQMNSLKPEDTAVYYC |
| | | AAIAYEEGVYRWDWGQGTLVTVSS |
| IL1RL2- | 894 | EVQLVESGGGLVQPGGSLRLSCAASGGTFSSYAMGWFRQAPGKEREFV |
| 104 | | AAISSSGGTTYYADSVKGRFTISADNSKNTAYLQMNSLKPEDTAVYYC |
| | | ARGSGYGDDYWGQGTLVTVSS |
| IL1RL2- | 895 | EVQLVESGGGLVQPGGSLRLSCAASGRTFDSYDMGWFRQAPGKERELV |
| 105 | | ASITYLGRTYADSVKGRFTISADNSKNTAYLQMNSLKPEDTAVYYCAA |
| | | IAYEEGVYRWDWGQGTLVTVSS |
| IL1RL2- | 896 | EVQLVESGGGLVQPGGSLRLSCAASGDIFTLASMGWFRQAPGKEREFV |
| 106 | | AGISRSGASTAYADSVKGRFTISADNSKNTAYLQMNSLKPEDTAVYYC |
| | | ARGSVGGFDPWGQGTLVTVSS |
| IL1RL2- | 897 | EVQLVESGGGLVQPGGSLRLSCAASGRTKDMGWFRQAPGKEREFVAAI |
| 107 | | SPSGSLKAYADSVKGRFTISADNSKNTAYLQMNSLKPEDTAVYYCAAR |
| | | EWPFSTIPSGWRWGQGTLVTVSS |
| IL1RL2- | 898 | EVQLVESGGGLVQPGGSLRLSCAASGHTFSSYAMGWFRQAPGKEREFV |
| 108 | | GAINWSGARTYYADSVKGRFTISADNSKNTAYLQMNSLKPEDTAVYYC |
| | | AVSQPLNYYTYYDARRYDWGQGTLVTVSS |
| IL1RL2- | 899 | EVQLVESGGGLVQPGGSLRLSCAASGFILREYNMGWFRQAPGKEREFV |
| 109 | | AAISPSAFTEYADSVKGRFTISADNSKNTAYLQMNSLKPEDTAVYYCA |
| | | DVNGDWGQGTLVTVSS |
| IL1RL2- | 900 | EVQLVESGGGLVQPGGSLRLSCAASGRTFSTYDMGWFRQAPGKERELV |
| 110 | | ASITYLGRTYADSVKGRFTISADNSKNTAYLQMNSLKPEDTAVYYCAA |
| | | IAYEEGVYRWDWGQGTLVTVSS |
| IL1RL2- | 901 | EVQLVESGGGLVQPGGSLRLSCAASGGTFSSYWMGWFRQAPGKEREWV |
| 111 | | SSIDYSAEDTYYADSVKGRFTISADNSKNTAYLQMNSLKPEDTAVYYC |
| | | AAIAHEEGVYRWDWGQGTLVTVSS |
| IL1RL2- | 902 | EVQLVESGGGLVQPGGSLRLSCAASGFILREYNMGWFRQAPGKEREFV |
| 112 | | AGITSSGGFTEYADSVKGRFTISADNSKNTAYLQMNSLKPEDTAVYYC |
| | | AAANEYWVYVNPNRYTWGQGTLVTVSS |
| IL1RL2- | 903 | EVQLVESGGGLVQPGGSLRLSCAASGFAFSSDWMGWFRQAPGKEREWV |
| 113 | | SSIDYSAEDTYYADSVKGRFTISADNSKNTAYLQMNSLKPEDTAVYYC |
| | | AAIAHEEGVYRWDWGQGTLVTVSS |
| IL1RL2- | 904 | EVQLVESGGGLVQPGGSLRLSCAASGFILREYNMGWFRQAPGKEREFV |
| 114 | | AAISPSAFTEYADSVKGRFTISADNSKNTAYLQMNSLKPEDTAVYYCA |
| | | AIAYEEGVYRWDWGQGTLVTVSS |
| IL1RL2- | 905 | EVQLVESGGGLVQPGGSLRLSCAASGRTGSTYDMGWFRQAPGKERELV |
| 115 | | AAISWSGGSTYYADSVKGRFTISADNSKNTAYLQMNSLKPEDTAVYYC |
| | | ADVNGDWGQGTLVTVSS |
| IL1RL2- | 906 | EVQLVESGGGLVQPGGSLRLSCAASGVFGPIRAMGWFRQAPGKEREYV |
| 116 | | AVINWSGGLFYADSVKGRFTISADNSKNTAYLQMNSLKPEDTAVYYCA |
| | | LTQSGSFYQVDWGQGTLVTVSS |
| IL1RL2- | 907 | EVQLVESGGGLVQPGGSLRLSCAASGRTFDSYDMGWFRQAPGKERELV |
| 117 | | ASITYLGRTYADSVKGRFTISADNSKNTAYLQMNSLKPEDTAVYYCAA |
| | | ANEYWVYVNPNRYTWGQGTLVTVSS |
| IL1RL2- | 908 | EVQLVESGGGLVQPGGSLRLSCAASGRTFSNYGWFRQAPGKEREWVSS |
| 118 | | IDYSAEDTYYADSVKGRFTISADNSKNTAYLQMNSLKPEDTAVYYCAA |
| | | WGQDGFTGKNWGQGTLVTVSS |
| IL1RL2- | 909 | EVQLVESGGGLVQPGGSLRLSCAASGRTFNRYPMGWFRQAPGKEREFV |
| 119 | | AAISRDGDRTYYADSVKGRFTISADNSKNTAYLQMNSLKPEDTAVYYC |
| | | IVGTYWGQGTLVTVSS |
| IL1RL2- | 910 | EVQLVESGGGLVQPGGSLRLSCAASGRTFSTYDMGWFRQAPGKEREFV |
| 120 | | AAITWDGSTYADSVKGRFTISADNSKNTAYLQMNSLKPEDTAVYYCAD |
| | | VNGDWGQGTLVTVSS |
| IL1RL2- | 911 | EVQLVESGGGLVQPGGSLRLSCAASGRTFSTYDMGWFRQAPGKEREFV |
| 121 | | AAITWSSRSTVYADSVKGRFTISADNSKNTAYLQMNSLKPEDTAVYYC |
| | | ADVNGDWGQGTLVTVSS |
| IL1RL2- | 912 | EVQLVESGGGLVQPGGSLRLSCAASGSIFSIGMGWFRQAPGKEREFVA |
| 122 | | HIFRSGITTYADSVKGRFTISADNSKNTAYLQMNSLKPEDTAVYYCAK |
| | | DRSQGGRNEFDYWGQGTLVTVSS |
| IL1RL2- | 913 | EVQLVESGGGLVQPGGSLRLSCAASGYTDSNLWMGWFRQAPGKEREWV |
| 123 | | ASINWSGGSTYYADSVKGRFTISADNSKNTAYLQMNSLKPEDTAVYYC |
| | | AANGIESYGWGNRHFNWGQGTLVTVSS |
| IL1RL2- | 914 | EVQLVESGGGLVQPGGSLRLSCAASGSTFSRYDMGWFRQAPGKERELV |
| 124 | | ASIVWIGGRTYYADSVKGRFTISADNSKNTAYLQMNSLKPEDTAVYYC |
| | | ADVNGDWGQGTLVTVSS |
| IL1RL2- | 915 | EVQLVESGGGLVQPGGSLRLSCAASGGSFSVKDMGWFRQAPGKEREFV |
| 125 | | SSISGGGSNTVYADSVKGRFTISADNSKNTAYLQMNSLKPEDTAVYYC |
| | | AAIAHEEGVYRWDWGQGTLVTVSS |
| IL1RL2- | 916 | EVQLVESGGGLVQPGGSLRLSCAASGRTLSTTAMGWFRQAPGKEREFV |
| 126 | | AVISWNNNYIHYADSVKGRFTISADNSKNTAYLQMNSLKPEDTAVYYC |
| | | AASPGGVRGAIDYWGQGTLVTVSS |
| IL1RL2- | 917 | EVQLVESGGGLVQPGGSLRLSCAASGRTGSTYDMGWFRQAPGKERELV |
| 127 | | AAISWSGDNTHYADSVKGRFTISADNSKNTAYLQMNSLKPEDTAVYYC |
| | | ADVNGDWGQGTLVTVSS |
| IL1RL2- | 918 | EVQLVESGGGLVQPGGSLRLSCAASGIAFSIFDMGWFRQAPGKEREFV |
| 128 | | ASITSGGSTVYADSVKGRFTISADNSKNTAYLQMNSLKPEDTAVYYCA |
| | | AIAYEEGVYRWDWGQGTLVTVSS |
| IL1RL2- | 919 | EVQLVESGGGLVQPGGSLRLSCAASGLTAGTYAMGWFRQAPGKEREGV |
| 129 | | AAIDWDGSRTQYADSVNGRFTISADNSKNTAYLQMNSLKPEDTAVYYC |
| | | ADVNGDWGQGTLVTVSS |
| IL1RL2- | 920 | EVQLVESGGGLVQPGGSLRLSCAASGSITSIRSMGWFRQAPGKERESV |
| 130 | | AAITGTSGGGTDYADSVKGRFTISADNSKNTAYLQMNSLKPEDTAVYY |
| | | CAAIAYEEGVYRWDWGQGTLVTVSS |
| IL1RL2- | 921 | EVQLVESGGGLVQPGGSLRLSCAASGIPSTIRAMGWFRQAPGKEREFV |
| 131 | | AAITRSAGSLTWYADSVKGRFTISADNSKNTAYLQMNSLKPEDTAVYY |
| | | CARDHANGSEPYWGQGTLVTVSS |
| IL1RL2- | 922 | EVQLVESGGGLVQPGGSLRLSCAASGPMSSSAVMGWFRQAPGKEREFV |
| 132 | | AVVTRWSGARTVYADSVKGRFTISADNSKNTAYLQMNSLKPEDTAVYY |
| | | CAAIAYEEGVYRWDWGQGTLVTVSS |
| IL1RL2- | 923 | EVQLVESGGGLVQPGGSLRLSCAASGFIFSSYWMGWFRQAPGKEREFV |
| 133 | | ATISWSGAYTEYADSVKGRFTISADNSKNTAYLQMNSLKPEDTAVYYC |
| | | AVSQPLNYYTYYDARRYDWGQGTLVTVSS |
| IL1RL2- | 924 | EVQLVESGGGLVQPGGSLRLSCAASGSITSIRSMGWFRQAPGKEREAV |
| 134 | | AAIGGVTDYADSVKGRFTISADNSKNTAYLQMNSLKPEDTAVYYCAAI |
| | | AHEEGVYRWDWGQGTLVTVSS |
| IL1RL2- | 925 | EVQLVESGGGLVQPGGSLRLSCAASGRTFSSYDMGWFRQAPGKERELV |
| 135 | | AAINWSGSSTVYADSVKGRFTISADNSKNTAYLQMNSLKPEDTAVYYC |
| | | ADVNGDWGQGTLVTVSS |
| IL1RL2- | 926 | EVQLVESGGGLVQPGGSLRLSCAASGSIDNIHAMGWFRQAPGKEREFV |
| 136 | | AADMWSGTTTYYADSVKGRFTISADNSKNTAYLQMNSLKPEDTAVYYC |
| | | ARRGDYGDYWYFDLWGQGTLVTVSS |
| IL1RL2- | 927 | EVQLVESGGGLVQPGGSLRLSCAASGSILSIHYMGWFRQAPGKEREWV |
| 137 | | SAINSDGSTYYADSVKGRFTISADNSKNTAYLQMNSLKPEDTAVYYCA |
| | | VGGREYSGVYYYREWGQGTLVTVSS |
| IL1RL2- | 928 | EVQLVESGGGLVQPGGSLRLSCAASGLTAGTYAMGWFRQAPGKEREGV |
| 138 | | AAIDWDGSRTQYADSVNGRFTISADNSKNTAYLQMNSLKPEDTAVYYC |
| | | AAANEYWVYVNPNRYTWGQGTLVTVSS |
| IL1RL2- | 929 | EVQLVESGGGLVQPGGSLRLSCAASGRTFSAYAMGWFRQAPGKEREWV |
| 139 | | ASINWSGGSTYYADSVKGRFTISADNSKNTAYLQMNSLKPEDTAVYYC |
| | | AIPPGYWGQGTLVTVSS |
| IL1RL2- | 930 | EVQLVESGGGLVQPGGSLRLSCAASGFTFDDAAMGWFRQAPGKEREHV |
| 140 | | ALITRGGTTGYADSVKGRFTISADNSKNTAYLQMNSLKPEDTAVYYCA |
| | | ADDSSAGWPPRNWGQGTLVTVSS |
| IL1RL2- | 931 | EVQLVESGGGLVQPGGSLRLSCAASGVTYSYYTMGWFRQAPGKEREFV |
| 141 | | AGITRSGGTTNYADSVKGRFTISADNSKNTAYLQMNSLKPEDTAVYYC |
| | | AIGGSLNWGQGTLVTVSS |
| IL1RL2- | 932 | EVQLVESGGGLVQPGGSLRLSCAASGSISSFNVMGWFRQAPGKEREFV |
| 142 | | AAISRSGTGTYYADSVKGRFTISADNSKNTAYLQMNSLKPEDTAVYYC |
| | | ARRGDTRSPELDYWGQGTLVTVSS |
| IL1RL2- | 933 | EVQLVESGGGLVQPGGSLRLSCAASGRTFSTYDMGWFRQAPGKEREFV |
| 143 | | AAITWSGTTNYADSVKGRFTISADNSKNTAYLQMNSLKPEDTAVYYCA |
| | | ADVNGDWGQGTLVTVSS |
| IL1RL2- | 934 | EVQLVESGGGLVQPGGSLRLSCAASGRTSSTATMGWFRQAPGKEREFV |
| 144 | | GSIDWIPSNIYYADSVKGRFTISADNSKNTAYLQMNSLKPEDTAVYYC |
| | | DVNGDWGQGTLVTVSS |
| IL1RL2- | 935 | EVQLVESGGGLVQPGGSLRLSCAASGFIFSSYWMGWFRQAPGKEREFV |
| 145 | | ADIYTSTTTNYTNYADSVKGRFTISADNSKNTAYLQMNSLKPEDTAVY |
| | | YCAAIAYEEGVYRWDWGQGTLVTVSS |
| IL1RL2- | 936 | EVQLVESGGGLVQPGGSLRLSCAASGRTFSTYDMGWFRQAPGKEREFV |
| 146 | | AAISWSGGSTNYADSVKGRFTISADNSKNTAYLQMNSLKPEDTAVYYC |
| | | AAIAYEEGVYRWDWGQGTLVTVSS |
| IL1RL2- | 937 | EVQLVESGGGLVQPGGSLRLSCAASGGTFSRYAMGWFRQALGKEREFV |
| 147 | | AAISWNGGSTIYADSVKGRFTISADNSKNTAYLQMNSLKPEDTAVYYC |
| | | ARDLYYDSSGYYYYYYGMDVWGQGTLVTVSS |
| IL1RL2- | 938 | EVQLVESGGGLVQPGGSLRLSCAASGRTFNSYSMGWFRQAPGKEREFV |
| 148 | | SAITWNGTRTYYADSVKGRFTISADNSKNTAYLQMNSLKPEDTAVYYC |
| | | AVSQPLNYYTYYDARRYDWGQGTLVTVSS |
| IL1RL2- | 939 | EVQLVESGGGLVQPGGSLRLSCAASGFTFSSYPMGWFRQAPGKEREFV |
| 149 | | ARITFGGVTNYADSVKGRFTISADNSKNTAYLQMNSLKPEDTAVYYCA |
| | | AYYDYVWGQGTLVTVSS |
| IL1RL2- | 940 | EVQLVESGGGLVQPGGSLRLSCAASGSAFSIKSMGWFRQAPGKEREFV |
| 150 | | AAISWYAYADSVKGRFTISADNSKNTAYLQMNSLKPEDTAVYYCAAIA |
| | | YEEGVYRWDWGQGTLVTVSS |
| IL1RL2- | 941 | EVQLVESGGGLVQPGGSLRLSCAASGSIFSIYDMGWFRQAPGKEREFV |
| 151 | | ASINSGSRTNYADSVKGRFTISADNSKNTAYLQMNSLKPEDTAVYYCA |
| | | AIAYEEGVYRWDWGQGTLVTVSS |
| IL1RL2- | 942 | EVQLVESGGGLVQPGGSLRLSCAASGPMSSSAVMGWFRQAPGKEREFV |
| 152 | | AVVTRWSGARTVYADSVKGRFTISADNSKNTAYLQMNSLKPEDTAVYY |
| | | CADVNGDWGQGTLVTVSS |
| IL1RL2- | 943 | EVQLLESGGGLVQPGGSLRLSCAASGFIFQWYDMGWVRQAPGKGLEWV |
| 153 | | SSIRGSSSSTYYADSVKGRFTISRDNSKNTLYLQMNSLRAEDTAVYYC |
| | | ARDLGDYWGQGTLVTVSS |
| IL1RL2- | 944 | EVQLLESGGGLVQPGGSLRLSCAASGFTFNHYGMGWVRQAPGKGLEWV |
| 154 | | SGITRSGSTNYRDSVKGRFTISRDNSKNTLYLQMNSLRAEDTAVYYCA |
| | | KSYLSGTFDYWGQGTLVTVSS |
| IL1RL2- | 945 | EVQLLESGGGLVQPGGSLRLSCAASGFTFPLYEMHWVRQAPGKGLEWV |
| 155 | | SIISPLGLSTYYADSVKGRFTISRDNSKNTLYLQMNSLRAEDTAVYYC |
| | | AKSYGAFDYWGQGTLVTVSS |
| IL1RL2- | 946 | EVQLLESGGGLVQPGGSLRLSCAASGFTFSSYWNHWVRQAPGKGLEWV |
| 156 | | STIGPSGTSTYYADSVKGRFTISRDNSKNTLYLQMNSLRAEDTAVYYC |
| | | AKSTPNIPLAYWGQGTLVTVSS |
| IL1RL2- | 947 | EVQLLESGGGLVQPGGSLRLSCAASGFTFPLYEMHWVRQAPGKGLEWV |
| 157 | | SIISPLGLSTYYADSVKGRFTISRDNSKNTLYLQMNSLRAEDTAVYYC |
| | | AKAYYGGFDYWGQGTLVTVSS |
| IL1RL2- | 948 | EVQLLESGGGLVQPGGSLRLSCAASGFTFSSYFMSWVRQAPGKGLEWV |
| 158 | | SEISPSGSETYYADSVKGRFTISRDNSKNTLYLQMNSLRAEDTAVYYC |
| | | ARAYSSGWSLPFDYWGQGTLVTVSS |
| IL1RL2- | 949 | EVQLLESGGGLVQPGGSLRLSCAASGFTFGDHGMGWVRQAPGKGLEWV |
| 159 | | GVIWGGGGTYYADSVKGRFTISRDNSKNTLYLQMNSLRAEDTAVYYCA |
| | | KGTTRFDYWGQGTLVTVSS |
| IL1RL2- | 950 | EVQLLESGGGLVQPGGSLRLSCAASGFTFFPYAMGWVRQAPGKGLEWV |
| 160 | | SWISPHGALTYYADSVKGRFTISRDNSKNTLYLQMNSLRAEDTAVYYC |
| | | AKGTTRFDYWGQGTLVTVSS |
| IL1RL2- | 951 | EVQLLESGGGLVQPGGSLRLSCAASGFTFSNSYISWVRQAPGKGLEWV |
| 161 | | SGIYPSGGSTVYADSVKGRFTISRDNSKNTLYLQMNSLRAEDTAVYYC |
| | | AKVRPFWGTFDYWGQGTLVTVSS |
| IL1RL2- | 952 | EVQLLESGGGLVQPGGSLRLSCAASGFTFNHYGMGWVRQAPGKGLEWV |
| 162 | | SSIGANGAPTYYADSVKGRFTISRDNSKNTLYLQMNSLRAEDTAVYYC |
| | | AKSYLSGTFDYWGQGTLVTVSS |
| IL1RL2- | 953 | EVQLLESGGGLVQPGGSLRLSCAASGFTFPSYFMSWVRQAPGKGLEWV |
| 163 | | SEISPSGSETYYADSVKGRFTISRDNSKNTLYLQMNSLRAEDTAVYYC |
| | | ARAYSSGWSLPFDYWGQGTLVTVSS |
| IL1RL2- | 954 | EVQLLESGGGLVQPGGSLRLSCAASGFTFEQTDMHWVRQAPGKGLEWV |
| 164 | | SSISPNGWDTYYADSVKGRFTISRDNSKNTLYLQMNSLRAEDTAVYYC |
| | | AKSRTGRYFDYWGQGTLVTVSS |
| IL1RL2- | 955 | EVQLLESGGGLVQPGGSLRLSCAASGFTFSSAAMSWVRQAPGKGLEWV |
| 165 | | SAISGSGGNTYYADSVKGRFTISRDNSKNTLYLQMNSLRAEDTAVYYC |
| | | ARSYGGGFDYWGQGTLVTVSS |
| IL1RL2- | 956 | EVQLLESGGGLVQPGGSLRLSCAASGFTFHKYGMAWVRQAPGKGLEWV |
| 166 | | SAISGSGGRPNYADSVKGRFTISRDNSKNTLYLQMNSLRAEDTAVYYC |
| | | AKGWRRFDYWGQGTLVTVSS |
| IL1RL2- | 957 | EVQLLESGGGLVQPGGSLRLSCAASGFTFSNYGVSWVRQAPGKGLEWV |
| 167 | | SGITRSGSTNYRDSVKGRFTISRDNSKNTLYLQMNSLRAEDTAVYYCA |
| | | KGRRIFDYWGQGTLVTVSS |
| IL1RL2- | 958 | EVQLLESGGGLVQPGGSLRLSCAASGFTFNHYGMGWVRQAPGKGLEWV |
| 168 | | SGITRSGSTNYRDSVKGRFTISRDNSKNTLYLQMNSLRAEDTAVYYCA |
| | | KSYLSGTFDYWGQGTLVTVSS |
| IL1RL2- | 959 | EVQLLESGGGLVQPGGSLRLSCAASGFTFNAYPMTWVRQAPGKGLEWV |
| 169 | | SVISGSGGRTNYADSVKGRFTISRDNSKNTLYLQMNSLRAEDTAVYYC |
| | | AKSGTDFDYWGQGTLVTVSS |
| IL1RL2- | 960 | EVQLLESGGGLVQPGGSLRLSCAASGFTFPVYNMAWVRQAPGKGLEWV |
| 170 | | SSISGYGSTTYYADSVKGRFTISRDNSKNTLYLQMNSLRAEDTAVYYC |
| | | AKSYGAFDYWGQGTLVTVSS |
| IL1RL2- | 961 | EVQLLESGGGLVQPGGSLRLSCAASGFTLSSYAMSWVRQAPGKGLEWV |
| 171 | | SGSGGSTYYADSVKGRFTISRDNSKNTLYLQMNSLRAEDTAVYYCARG |
| | | LYSFDYWGQGTLVTVSS |
| IL1RL2- | 962 | EVQLLESGGGLVQPGGSLRLSCAASGFTFGEYNMAWVRQAPGKGLEWV |
| 172 | | GYINPSRGYTYYADSVKGRFTISRDNSKNTLYLQMNSLRAEDTAVYYC |
| | | AKAVRNFAFDYWGQGTLVTVSS |
| IL1RL2- | 963 | EVQLLESGGGLVQPGGSLRLSCAASGFTFSEYGMWWVRQAPGKGLEWV |
| 173 | | SEISPSGGYTYYADSVKGRFTISRDNSKNTLYLQMNSLRAEDTAVYYC |
| | | AEQDVKGSSSFDYWGQGTLVTVSS |
| IL1RL2- | 964 | EVQLLESGGGLVQPGGSLRLSCAASGFTFSNYGMSWVRQAPGKGLEWV |
| 174 | | GYISNSGSTSYNDSVKGRFTISRDNSKNTLYLQMNSLRAEDTAVYYCA |
| | | KAGRKFDYWGQGTLVTVSS |
| IL1RL2- | 965 | EVQLLESGGGLVQPGGSLRLSCAASGLTFPNYGMGWVRQAPGKGLEWV |
| 175 | | SGITRSGSTNYRDSVKGRFTISRDNSKNTLYLQMNSLRAEDTAVYYCA |
| | | TAESDDKYDYWGQGTLVTVSS |
| IL1RL2- | 966 | EVQLLESGGGLVQPGGSLRLSCAASGFTFSNSYISWVRQAPGKGLEWV |
| 176 | | SSIRGSSSSTYYADSVKGRFTISRDNSKNTLYLQMNSLRAEDTAVYYC |
| | | ARSYGGGFDYWGQGTLVTVSS |
| IL1RL2- | 967 | EVQLLESGGGLVQPGGSLRLSCAASGFTFSFFDMMWVRQAPGKGLEWV |
| 177 | | SIISPLGLSTYYADSVKGRFTISRDNSKNTLYLQMNSLRAEDTAVYYC |
| | | AKSYQAGTFDYWGQGTLVTVSS |
| IL1RL2- | 968 | EVQLLESEGGLVQPGGSLRLSCAASGFTFSGYDMQWVRQAPGKGLEWV |
| 178 | | SSISSTGFKTYYADSVKGRFTISRDNSKNTLYLQMNSLRAEDTAVYYC |
| | | AKAGPPFAGSRGNSFDYWGQGTLVTVSS |
| IL1RL2- | 969 | EVQLLESGGGLVQPGGSLRLSCAASGFTFSPRRMSWVRQAPGKGLEWV |
| 179 | | STIDDLGRHTYYADSVKGRFTISRDNSKNTLYLQMNSLRAEDTAVYYC |
| | | AKLANSLLFDYWGQGTLVTVSS |
| IL1RL2- | 970 | EVQLLESGGGLVQPGGSLRLSCAASGFTFSDYDMSWVRQAPGKGLEWV |
| 180 | | SAIEGAGSDTYYADSVKGRFTISRDNSKNTLYLQMNSLRAEDTAVYYC |
| | | ARLAPEFDYWGQGTLVTVSS |
| IL1RL2- | 971 | EVQLLESGGGLVQPGGSLRLSCAASGFTFGQESMYWVRQAPGKGLEWV |
| 181 | | SGITRSGSTNYRDSVKGRFTISRDNSKNTLYLQMNSLRAEDTAVYYCA |
| | | KQLGEEFDYWGQGTLVTVSS |
| IL1RL2- | 972 | EVQLLESGGGLVQPGGSLRLSCAASGFTFDQYDMSWVRQAPGKGLEWV |
| 182 | | GYISNSGSTSYNDSVKGRFTISRDNSKNTLYLQMNSLRAEDTAVYYCA |
| | | RWTSGLDYWGQGTLVTVSS |
| IL1RL2- | 973 | EVQLLESGGGLVQPGGSLRLSCAASGFTFDQYDMSWVRQAPGKGLEWV |
| 183 | | SLIPHTGNPTYYADSVKGRFTISRDNSKNTLYLQMNSLRAEDTAVYYC |
| | | ARRHWPGGFDYWGQGTLVTVSS |
| IL1RL2- | 974 | EVQLLESGGGLVQPGGSLRLSCAASGFTFSDYDMSWVRQAPGKGLEWV |
| 184 | | SSISPSGGWTEYADSVKGRFTISRDNSKNTLYLQMNSLRAEDTAVYYC |
| | | ARHDYSNYPYFDYWGQGTLVTVSS |
| IL1RL2- | 975 | EVQLLESGGGLVQPGGSLRLSCAASGFTFDKYLMSWVRQAPGKGLEWV |
| 185 | | SAISGRGDNTYYADSVKGRFTISRDNSKNTLYLQMNSLRAEDTAVYYC |
| | | ARGGDTYFDYFDYWGQGTLVTVSS |
| IL1RL2- | 976 | EVQLLESGGGLVQPGGSLRLSCAASGFTFPLYEMHWVRQAPGKGLEWV |
| 186 | | ATISGGGINTYYPDSVKGRFTISRDNSKNTLYLQMNSLRAEDTAVYYC |
| | | ARGPYNYLAYWGQGTLVTVSS |
| IL1RL2- | 977 | EVQLLESGGGLVQPGGSLRLSCAASGFTLSSYAMSWVRQAPGKGLEWV |
| 187 | | SSISSSGGYTGYADSVKGRFTISRDNSKNTLYLQMNSLRAEDTAVYYC |
| | | AKSFSFFDYWGQGTLVTVSS |
| IL1RL2- | 978 | EVQLLESGGGLVQPGGSLRLSCAASGFTFDQYDMSWVRQAPGKGLEWV |
| 188 | | GISNSGSTSYNDSVKGRFTISRDNSKNTLYLQMNSLRAEDTAVYYCAR |
| | | WTSGLDYWGQGTLVTVSS |
| IL1RL2- | 979 | EVQLLESGGGLVQPGGSLRLSCAASGFTFSDYTMNWVRQAPGKGLEWV |
| 189 | | SGISPSGGITTYADSVKGRFTISRDNSKNTLYLQMNSLRAEDTAVYYC |
| | | AKGTTRFDYWGQGTLVTVSS |
| IL1RL2- | 980 | EVQLLESGGGLVQPGGSLRLSCAASGFTFSPYLMSWVRQAPGKGLEWV |
| 190 | | SSISSTGFKTYYADSVKGRFTISRDNSKNTLYLQMNSLRAEDTAVYYC |
| | | AKGTTRFDYWGQGTLVTVSS |
| IL1RL2- | 981 | EVQLLESGGGLVQPGGSLRLSCAASGLTFPNYGMGWVRQAPGKGLEWV |
| 191 | | SGISPSGGITTYADSVKGRFTISRDNSKNTLYLQMNSLRAEDTAVYYC |
| | | AKSGAYFDYWGQGTLVTVSS |
| IL1RL2- | 982 | EVQLLESGGGLVQPGGSLRLSCAASGFTFSSYFMSWVRQAPGKGLEWV |
| 192 | | SEISPSGSETYYADSVKGRFTISRDNSKNTLYLQMNSLRAEDTAVYYC |
| | | AKSRTGRYFDYWGQGTLVTVSS |
| IL1RL2- | 983 | EVQLLESGGGLVQPGGSLRLSCAASGFTFGDHGMGWVRQAPGKGLEWV |
| 193 | | SGITRSGSTNYRDSVKGRFTISRDNSKNTLYLQMNSLRAEDTAVYYCA |
| | | KSYLSGTFDYWGQGTLVTVSS |
| IL1RL2- | 984 | EVQLLESGGGLVQPGGSLRLSCAASGFTFSEYGMWWVRQAPGKGLEWV |
| 194 | | SEISPSGGYTYYADSVKGRFTISRDNSKNTLYLQMNSLRAEDTAVYYC |
| | | ASEQAGDYWGQGTLVTVSS |
| IL1RL2- | 985 | EVQLLESGGGLVQPGGSLRLSCAASGFTFKDYGMNWVRQAPGKGLEWV |
| 195 | | SSIGANGAPTYYADSVKGRFTISRDNSKNTLYLQMNSLRAEDTAVYYC |
| | | AKSYLSGTFDYWGQGTLVTVSS |
| IL1RL2- | 986 | EVQLLESGGGLVQPGGSLRLSCAASGFTFSNYGMSWVRQAPGKGLEWV |
| 196 | | GISNSGSTSYNDSVKGRFTISRDNSKNTLYLQMNSLRAEDTAVYYCAK |
| | | AGRKFDYWGQGTLVTVSS |
| IL1RL2- | 987 | EVQLLESGGGLVQPGGSLRLSCAASGFTFSEYGMWWVRQAPGKGLEWV |
| 197 | | SEIDALGTDTYYADSVKGRFTISRDNSKNTLYLQMNSLRAEDTAVYYC |
| | | ASEQAGDYWGQGTLVTVSS |
| IL1RL2- | 988 | EVQLLESGGGLVQPGGSLRLSCAASGYSISSGYHWAWVRQAPGKGLEW |
| 198 | | VSAISGSGGGTSYADSVKGRFTISRDNSKNTLYLQMNSLRAEDTAVYY |
| | | CARGRLLFDYWGQGTLVTVSS |
| IL1RL2- | 989 | QVQLVQSGAEVKKPGSSVKVSCKASGGSFSSYAISWVRQAPGQGLEWM |
| 199 | | GGIIPLNYAQKFQGRVTITADESTSTAYMELSSLRSEDTAVYYCARGV |
| | | AYYDFWSGHFSDAFDVWGQGTLVTVSS |
| IL1RL2- | 990 | EVQLLESGGGLVQPGGSLRLSCAASGFTFEQTDMHWVRQAPGKGLEWV |
| 200 | | SSISPNGWDTYYADSVKGRFTISRDNSKNTLYLQMNSLRAEDTAVYYC |
| | | ARAYSSGWSLPFDYWGQGTLVTVSS |
| IL1RL2- | 991 | EVQLLESGGGLVQPGGSLRLSCAASGFTFKAYPIMWVRQAPGKGLEWV |
| 201 | | SGIYPSGGSTVYADSVKGRFTISRDNSKNTLYLQMNSLRAEDTAVYYC |
| | | AKSRTGRYFDYWGQGTLVTVSS |
| IL1RL2- | 992 | EVQLLESGGGLVQPGGSLRLSCAASGFTFNHYGMGWVRQAPGKGLEWV |
| 202 | | SIISPLGLSTYYADSVKGRFTISRDNSKNTLYLQMNSLRAEDTAVYYC |
| | | AKYGETSGPISENFDYWGQGTLVTVSS |
| IL1RL2- | 993 | EVQLLESGGGLVQPGGSLRLSCAASGFTFEQTDMHWVRQAPGKGLEWV |
| 203 | | SSISPNGWDTYYADSVKGRFAISRDNSKNTLYLQMNSLRAEDTAVYYC |
| | | AKSRTGRYFDYWGQGTLVTVSS |
| IL1RL2- | 994 | EVQLLESGGGLVQPGGSLRLSCAASGFTFNHYGMGWVRQAPGKGLEWV |
| 204 | | SSIRGSSSSTYYADSVKGRFTISRDNSKNTLYLQMNSLRAEDTAVYYC |
| | | AKSYQAGTFDYWGQGTLVTVSS |
| IL1RL2- | 995 | EVQLLESGGGLVQPGGSLRLSCAASGFTFEPVIMGWVRQAPGKGLEWV |
| 205 | | SSIRGSSSSTYYADSVKGRFTISRDNSKNTLYLQMNSLRAEDTAVYYC |
| | | AKGLRAFDYWGQGTLVTVSS |
| IL1RL2- | 996 | EVQLLESGGGLVQPGGSLRLSCAASGFTFSEYGMWWVRQAPGKGLEWV |
| 206 | | SEISPSGGYTYYADSVKGRFTISRDNSKNTLYLQMNSLRAEDTAVYYC |
| | | AGSSGWSEYWGQGTLVTVSS |
| IL1RL2- | 997 | EVQLLESGGGLVQPGGSLRLSCAASGFTFSSYFMSWVRQAPGKGLEWV |
| 207 | | SEISPSGSETYYADSVKGRFTISRDNSKNTLYLQMNSLRAEDTAVYYC |
| | | AKGTTRFDYWGQGTLVTVSS |
| IL1RL2- | 998 | EVQLLESGGGLVQPGGSLRLSCAASGFTFSEYGMWWVRQAPGKGLEWV |
| 208 | | SEISPSGSETYYADSVKGRFTISRDNSKNTLYLQMNSLRAEDTAVYYC |
| | | AEQDVKGSSSFDYWGQGTLVTVSS |
| IL1RL2- | 999 | QVQLVQSGAEVKKPGSSVKVSCKASGHTFNNYAISWVRQAPGQGLEWM |
| 209 | | GGIIPVNYAQKFQGRVTITADESTSTAYMELSSLRSEDTAVYYCAQWG |
| | | IAAAGAFYFDSWGQGTLVTVSS |
| IL1RL2- | 1000 | EVQLLESGGGLVQPGGSLRLSCAASGFTFSSYWNHWVRQAPGKGLEWV |
| 210 | | STIGPSGTSTYYADSVKGRFTISRDNSKNTLYLQMNSLRAEDTAVYYC |
| | | ARDLGDYWGQGTLVTVSS |
| IL1RL2- | 1001 | EVQLLESGGGLVQPGGSLRLSCAASGFTFSNYGMSWVRQAPGKGLEWV |
| 211 | | SIISPLGLSTYYADSVKGRFTISRDNSKNTLYLQMNSLRAEDTAVYYC |
| | | AKGPSSTSPFDYWGQGTLVTVSS |
| IL1RL2- | 1002 | EVQLLESGGGLVQPGGSLRLSCAASGFTFSEYGMWWVRQAPGKGLEWV |
| 212 | | SEISPSGGYTYYADSVKGRFTISRDNSKNTLYLQMNSLRAEDTAVYYC |
| | | AGSSGWSEYWGQGTLVTVSS |
| IL1RL2- | 1003 | EVQLLESGGGLVQPGGSLRLSCAASGFTFSEYGMWWVRQAPGKGLEWV |
| 213 | | SEIDALGTDTYYADSVKGRFTISRDNSKNTLYLQMNSLRAEDTAVYYC |
| | | ATHAAAGDYWGQGTLVTVSS |
| IL1RL2- | 1004 | EVQLLESGGGLVQPGGSLRLSCAASGFTFFPYAMGWVRQAPGKGLEWV |
| 214 | | SWISPHGALTYYADSVKGRFTISRDNSKNTLYLQMNSLRAEDTAVYYC |
| | | AKSRTGRYFDYWGQGTLVTVSS |
| IL1RL2- | 1005 | EVQLLESGGGLVQPGGSLRLSCAASGFTFSPYLMSWVRQAPGKGLEWV |
| 215 | | SAIIGSGSNTYYADSVKGRFTISRDNSKNTLYLQMNSLRAEDTAVYYC |
| | | AKGSLRHFDYWGQGTLVTVSS |
| IL1RL2- | 1006 | EVQLLESGGGLVQPGGSLRLSCAASGFTFSEYGMWWVRQAPGKGLEWV |
| 216 | | SEISPSGGYTYYADSVKGRFTISRDNSKNTLYLQMNSLRAEDTAVYYC |
| | | ASEQAGDYWGQGTLVTVSS |
| IL1RL2- | 1007 | EVQLLESGGGLVQPGGSLRLSCAASGFTFEQTDMHWVRQAPGKGLEWV |
| 217 | | SSISPNGWDTYYADSVKGRFTISRDNSKNTLYLQMNSLRAEDTAVYYC |
| | | AKSFSFFDYWGQGTLVTVSS |
| IL1RL2- | 1008 | EVQLLESGGGLVQPGGSLRLSCAASGFTFSSYWNHWVRQAPGKGLEWV |
| 218 | | STIGPSGTSTYYADSVKGRFTISRDNSKNTLYLQMNSLRAEDTAVYYC |
| | | AKGTTRFDYWGQGTLVTVSS |
| IL1RL2- | 1009 | EVQLLESGGGLVQPGGSLRLSCAASGFTFEQTDMHWVRQAPGKGLEWV |
| 219 | | SSISPNGWDTYYADSVKGRFTISRDNSKNTLYLQMNSLRAEDTAVYYC |
| | | AKGTTRFDYWGQGTLVTVSS |
| IL1RL2- | 1010 | EVQLLESGGGLVQPGGSLRLSCAASGFTFSEYGMWWVRQAPGKGLEWV |
| 220 | | SEIDALGTDTYYADSVKGRFTISRDNSKNTLYLQMNSLRAEDTAVYYC |
| | | ASEQAGDYWGQGTLVTVSS |
| IL1RL2- | 1011 | EVQLLESGGGLVQPGGSLRLSCAASGFTFSSYFMSWVRQAPGKGLEWV |
| 221 | | SEISPSGSETYYADSVKGRFTISRDNSKNTLYLQMNSLRAEDTAVYYC |
| | | ARWTSGLDYWGQGTLVTVSS |
| IL1RL2- | 1012 | EVQLLESGGGLVQPGGSLRLSCAASGFTFSEYGMWWVRQAPGKGLEWV |
| 222 | | SEISPSGSETYYADSVKGRFTISRDNSKNTLYLQMNSLRAEDTAVYYC |
| | | AEQDVKGSSSFDYWGQGTLVTVSS |
| IL1RL2- | 1013 | EVQLLESGGGLVQPGGSLRLSCAASGFTFPLYEMHWVRQAPGKGLEWV |
| 223 | | SIISGQGTVTYYADSVKGRFTISRDNSKNTLYLQMNSLRAEDTAVYYC |
| | | AKSGTSFDYWGQGTLVTVSS |
| IL1RL2- | 1014 | EVQLLESGGGLVQPGGSLRLSCAASGFIFQWYDMGWVRQAPGKGLEWV |
| 224 | | SSIRGSSSSTYYADSVKGRFTISRDNSKNTLYLQMNSLRAEDTAVYYC |
| | | ARAYSSGWSLPFDYWGQGTLVTVSS |
| IL1RL2- | 1015 | EVQLLESGGGLVQPGGSLRLSCAASGFTFFPYAMGWVRQAPGKGLEWV |
| 225 | | SWISPHGALTYYADSVKGRFTISRDNSKNTLYLQMNSLRAEDTAVYYC |
| | | ARAYSSGWSLPFDYWGQGTLVTVSS |
| IL1RL2- | 1016 | EVQLLESGGGLVQPGGSLRLSCAASGFTFPLYEIHWVRQAPGKGLEWV |
| 226 | | SSISGYGSTTYYADSVKGRFTISRDNSKNTLYLQMNSLRAEDTAVYYC |
| | | AKGTTRFDYWGQGTLVTVSS |
| IL1RL2- | 1017 | EVQLLESGGGLVQPGGSLRLSCAASGFTFPLYEMHWVRQAPGKGLEWV |
| 227 | | SIISPLGLSTYYADSVKGRFTISRDNSKNTLYLQMNSLRAEDTAVYYC |
| | | ARAYSSGWSLPFDYWGQGTLVTVSS |
| IL1RL2- | 1018 | EVQLLESGGGLVQPGGSLRLSCAASGFTFSSAAMSWVRQAPGKGLEWV |
| 228 | | SGISPSGGITTYADSVKGRFTISRDNSKNTLYLQMNSLRAEDTAVYYC |
| | | ARIRVGPSGGAFDYWGQGTLVTVSS |
| IL1RL2- | 1019 | EVQLLESGGGLVQPGGSLRLSCAASGFTFSSYFMSWVRQAPGKGLEWV |
| 229 | | SSIRGSSSSTYYADSVKGRFTISRDNSKNTLYLQMNSLRAEDTAVYYC |
| | | ARDLGDYWGQGTLVTVSS |
| IL1RL2- | 1020 | EVQLLESGGGLVQPGGSLRLSCAASGFTFSSAAMSWVRQAPGKGLEWV |
| 230 | | SISDHGFNTYYADSVKGRFTISRDNSKNTLYLQMNSLRAEDTAVYYCA |
| | | RDRGGATTLDYWGQGTLVTVSS |
| IL1RL2- | 1021 | EVQLLESGGGLVQPGGSLRLSCAASGFTFSEYGMWWVRQAPGKGLEWV |
| 231 | | SEISPSGGYTYYADSVKGRFTISRDNSKNTLYLQMNSLRAEDTAVYYC |
| | | AGSSGWSEYWGQGTLVTVSS |
| IL1RL2- | 1022 | EVQLLESGGGLVQPGGSLRLSCAASGFTFGDHGMGWVRQAPGKGLEWV |
| 232 | | SWIEGRGTETYYADSVKGRFTISRDNSKNTLYLQMNSLRAEDTAVYYC |
| | | ARGRLFDYWGQGTLVTVSS |
| IL1RL2- | 1023 | EVQLLESGGGLVQPGGSLRLSCAASGFMFSWYDMGWVRQAPGKGLEWV |
| 233 | | SSISSTGFKTYYADSVKGRFTISRDNSKNTLYLQMNSLRAEDTAVYYC |
| | | ALGGSYFGYWGQGTLVTVSS |
| IL1RL2- | 1024 | EVQLLESGGGLVQPGGSLRLSCAASGFIFQWYDMGWVRQAPGKGLEWV |
| 234 | | SSIRGSSSSTYYADSVKGRFTISRDNSKNTLYLQMNSLRAEDTAVYYC |
| | | AKGTTRFDYWGQGTLVTVSS |
| IL1RL2- | 1025 | EVQLLESGGGLVQPGGSLRLSCAASGFTFGDHGMGWVRQAPGKGLEWV |
| 235 | | GVIWGGGGTYYADSVKGRFTISRDNSKNTLYLQMNSLRAEDTAVYYCA |
| | | KSRTGRYFDYWGQGTLVTVSS |
| IL1RL2- | 1026 | EVQLLESGGGLVQPGGSLRLSCAASGFTFSSYWNHWVRQAPGKGLEWV |
| 236 | | SSINDRGDQTYYADSVKGRFTISRDNSKNTLYLQMNSLRAEDTAVYYC |
| | | AKGSLSSGWDYWGQGTLVTVSS |
| IL1RL2- | 1027 | EVQLLESGGGLVQPGGSLRLSCAASGFTFPLYEMHWVRQAPGKGLEWV |
| 237 | | SIISPLGLSTYYADSVKGRFTISRDNSKNTLYLQMNSLRAEDTAVYYC |
| | | AKSRTGRYFDYWGQGTLVTVSS |
| IL1RL2- | 1028 | EVQLLESGGGLVQPGGSLRLSCAASGFTFEQTDMHWVRQAPGKGLEWV |
| 238 | | SSISPNGWDTYYADSVKGRFTISRDNSKNTLYLQMNSLRAEDTAVYYC |
| | | ARSYGGGFDYWGQGTLVTVSS |
| IL1RL2- | 1029 | EVQLLESGGGLVQPGGSLRLSCAASGFTFGDHGMGWVRQAPGKGLEWV |
| 239 | | GVIWGGGGTYYADSVKGRFTISRDNSKNTLYLQMNSLRAEDTAVYYCA |
| | | RAYSSGWSLPFDYWGQGTLVTVSS |
| IL1RL2- | 1030 | EVQLLESGGGLVQPGGSLRLSCAASGFTFNHYGMGWVRQAPGKGLEWV |
| 240 | | SGITRSGSTNYRDSVKGRFTISRDNSKNTLYLQMNSLRAEDTAVYYCA |
| | | KSYLSGTFDYWGRGTLVTVSS |
| IL1RL2- | 1031 | EVQLLESGGGLVQPGGSLRLSCAASGFTFGDYDMWWVRQAPGKGLEWV |
| 241 | | SEISPSGGYTYYADSVKGRFTISRDNSKNTLYLQMNSLRAEDTAVYYC |
| | | AGSSGWSEYWGQGTLVTVSS |
| IL1RL2- | 1032 | EVQMLESGGGLVQPGGSLRLSCAASGFTFEQTDMHWVRQAPGKGLEWV |
| 242 | | SSISPNGWDTYYADSVKGRFTISRDNSKNTLYLQMNSLRAEDTAVYYC |
| | | AKSTPNIPLAYWGQGTLVTVSS |
| IL1RL2- | 1033 | EVQLLESGGGLVQPGGSLRLSCAASGFTFSSYWNHWVRQAPGKGLEWV |
| 243 | | SEISPSGSETYYADSVKGRFTISRDNSKNTLYLQMNSLRAEDTAVYYC |
| | | ATAEEIPGYDYWGQGTLVTVSS |
| IL1RL2- | 1034 | EVQLLESGGGLVQPGGSLRLSCAASGFTFNAYPMTWVRQAPGKGLEWV |
| 244 | | SVISGSGGRTNYADSVKGRFTISRDNSKNTLYLQMNSLRAEDTAVYYC |
| | | AKGTTRFDYWGQGTLVTVSS |
| IL1RL2- | 1035 | EVQLLESGGGLVQPGGSLRLSCAASGFTFSPYPMMWVRQAPGKGLEWV |
| 245 | | SGIAHNGRNTYYADSVKGRFTISRDNSKNTLYLQMNSLRAEDTAVYYC |
| | | AKGWRRFDYWGQGTLVTVSS |
| IL1RL2- | 1036 | EVQLLESGGGLVQPGGSLRLSCAASGFTFEPVIMGWVRQAPGKGLEWV |
| 246 | | SGIYPSGGSTVYADSVKGRFTISRDNSKNTLYLQMNSLRAEDTAVYYC |
| | | AKLGRRFDYWGQGTLVTVSS |
| IL1RL2- | 1037 | EVQLLESGGGLVQPGGSLRLSCAASGFTFPLYEMHWVRQAPGKGLEWV |
| 247 | | SIISPLGLSTYYADSVKGRFTISRDNSKNTLYLQMNSLRAEDTAVYYC |
| | | AKGTTRFDYWGQGTLVTVSS |
| IL1RL2- | 1038 | EVQLLESGGGLVQPGGSLRLSCAASGFTSNNFAMTWVRQAPGKGLEWV |
| 248 | | SSIRGSSSSTYYADSVKGRFTISRDNSKNTLYLQMNSLRAEDTAVYYC |
| | | AKGFRIFDYWGQGTLVTVSS |
| IL1RL2- | 1039 | EVQLLESGGGLVQPGGSLRLSCAASGFTFSNYGVSWVRQAPGKGLEWV |
| 249 | | SIISPLGLSTYYADSVKGRFTISRDNSKNTLYLQMNSLRAEDTAVYYC |
| | | ARGSYIIWSALDYWGQGTLVTVSS |
| IL1RL2- | 1040 | EVQLLESGGGLVQPGGSLRLSCAASGFTFFPYAMGWVRQAPGKGLEWV |
| 250 | | SWISPHGALTYYADSVKGRFTISRDNSKNTLYLQMNSLRAEDTAVYYC |
| | | AKSTPNIPLAYWGQGTLVTVSS |
| IL1RL2- | 1041 | EVQLLESGGGLVQPGGSLRLSCAASGSTFAGYEVWWVRQAPGKGLEWV |
| 251 | | SEISPSGGYTYYADSVKGRFTISRDNSKNTLYLQMNSLRAEDTAVYYC |
| | | ATHAAAGDYWGQGTLVTVSS |
| IL1RL2- | 1042 | EVQLLESGGGLVQPGGSLRLSCAASGFTFNHYGMGWVRQAPGKGLEWV |
| 252 | | SIISPLGLSTYYADSVKGRFTISRDNSKNTLYLQMNSLRAEDTAVYYC |
| | | AKYGETSGPISENFDYWGQGTLVTVSS |
| IL1RL2- | 1043 | EVQLLESGGGLVQPGGSLRLSCAASGFTFPLYEMHWVRQAPGKGLEWV |
| 253 | | SIISPLGLSTYYADSVKGRFTISRDNSKNTLYLQMNSLRAEDTAVYYC |
| | | ARWSSRAFDYWGQGTLVTVSS |
| IL1RL2- | 1044 | EVQLLESGGGLVQPGGSLRLSCAASGFTFHKYGMAWVRQAPGKGLEWV |
| 254 | | SAISGSGGRPNYADSVKGRFTISRDNSKNTLYLQMNSLRAEDTAVYYC |
| | | AKSTPNIPLAYWGQGTLVTVSS |
| IL1RL2- | 1045 | EVQLLESGGGLVQPGGSLRLSCAASGFTFEQTDMHWVRQAPGKGLEWV |
| 255 | | SSISPNGWDTYYADSVKGRFTISRDNSKNTLYLQMNSLRAEDTAVYYC |
| | | AKAYYGGFDYWGQGTLVTVSS |
| IL1RL2- | 1046 | EVQLLESEGGLVQPGGSLRLSCAASGFTFSGYDMQWVRQAPGKGLEWV |
| 256 | | SSISSTGFKTYYADSVKGRFTISRDNSKNTLYLQMNSLRAEDTAVYYC |
| | | ARAYSSGWSLPFDYWGQGTLVTVSS |
| IL1RL2- | 1047 | EVQLLESGGGLVQPGGSLRLSCAASGFIFQWYDMGWVRQAPGKGLEWV |
| 257 | | SSIRGSSSSTYYADSVKGRFTISRDNSKNTLYLQMNSLRAEDTAVYYC |
| | | AKSTPNIPLAYWGQGTLVTVSS |
| IL1RL2- | 1048 | EVQLLESGGGLVQPGGSLRLSCAASGFTFSSYWNHWVRQAPGKGLEWV |
| 258 | | STIGPSGTSTYYADSVKGRFTISRDNSKNTLYLQMNSLRAEDTAVYYC |
| | | ARHPIYSGNYQGYFDYWGQGTLVTVSS |
| IL1RL2- | 1049 | EVQLLESGGGLVQPGGSLRLSCAASGFTFSEYGMWWVRQAPGKGLEWV |
| 259 | | SEISPSGGYTYYADSVKGRFTISRDNSKNTLYLQMNSLRAEDTAVYYC |
| | | AGSSGWSEYWGQGTLVTVSS |
| IL1RL2- | 1050 | EVQLLESGGGLVQPGGSLRLSCAASGFTFSSAAMSWVRQAPGKGLEWV |
| 260 | | SGISPSGGITTYADSVKGRFTISRDNSKNTLYLQMNSLRAEDTAVYYC |
| | | AKSTPNIPLAYWGQGTLVTVSS |
| IL1RL2- | 1051 | EVQLLESGGGLVQPGGSLRLSCAASGSTFAGYEVWWVRQAPGKGLEWV |
| 261 | | SEISPSGEYTYYADSVKGRFTISRDNSKNTLYLQMNSLRAEDTAVYYC |
| | | AKSNGRFDYWGQGTLVTVSS |
| IL1RL2- | 1052 | EVQLLESGGGLVQPGGSLRLSCAASGFTFPLYEMHWVRQAPGKGLEWV |
| 262 | | SIISPLGLSTYYADSVKGRFTISRDNSKNTLYLQMNSLRAEDTAVYYC |
| | | AKGNSRYVFDYWGQGTLVTVSS |
| IL1RL2- | 1053 | EVQLLESGGGLVQPGGSLRLSCAASGFTFEQTDMHWVRQAPGKGLEWV |
| 263 | | SSISPNGWDTYYADSVKGRFTISRDNSKNTLYLQMNSLRAEDTAVYYC |
| | | AGSSGWSEYWGQGTLVTVSS |
| IL1RL2- | 1054 | EVQLLESGGGLVQPGGSLRLSCAASGFTFKDYGMNWVRQAPGKGLEWV |
| 264 | | SSIGANGAPTYYADSVKGRFTISRDNSKNTLYLQMNSLRAEDTAVYYC |
| | | AKSYLSGTFDYWGQGTLVTVSS |
| IL1RL2- | 1055 | EVQLLESGGGLVQPGGSLRLSCAASGLTFPNYGMGWVRQAPGKGLEWV |
| 265 | | SGISPSGGITTYADSVKGRFTISRDNSKNTLYLQMNSLRAEDTAVYYC |
| | | AKSGAYFDYWGQGTLVTVSS |
| IL1RL2- | 1056 | EVQLLESGGGLVQPGGSLRLSCAASGFTFFPYAMGWVRQAPGKGLEWV |
| 266 | | SWISPHGALTYYADSVKGRFTISRDNSKNTLYLQMNSLRAEDTAVYYC |
| | | ARSYGGGFDYWGQGTLVTVSS |
| IL1RL2- | 1057 | EVQLLESGGGLVQPGGSLRLSCAASGFTFPLYEMHWVRQAPGKGLEWV |
| 267 | | SIISPLGLSTYYADSVKGRFTISRDNSKNTLYLQMNSLRAEDTAVYYC |
| | | ARSYGGGFDYWGQGTLVTVSS |
| IL1RL2- | 1058 | EVQLLESGGGLVQPGGSLRLSCAASGFTFNHYGMGWVRQAPGKGLEWV |
| 268 | | SIISPLGLSTYYADSMKGRFTISRDNSKNTLYLQMNSLRAEDTAVYYC |
| | | ARSGVGATKIFDYWGQGTLVTVSS |
| IL1RL2- | 1059 | EVQLLESGGGLVQPGGSLRLSCAASGFTFSSAAMSWVRQAPGKGLEWV |
| 269 | | SAISGSGGNTYYADSVKGRFTISRDNSKNTLYLQMNSLRAEDTAVYYC |
| | | AKAGPPFAGSRGNSFDYWGQGTLVTVSS |
| IL1RL2- | 1060 | EVQLLESGGGLVQPGGSLRLSCAASGFTFSSYWNHWVRQAPGKGLEWV |
| 270 | | STIGPSGTSTYYADSVKGRFTISRDNSKNTLYLQMNSLRAEDTAVYYC |
| | | AKSYGAFDYWGQGTLVTVSS |
| IL1RL2- | 1061 | EVQLLESGGGLVQPGGSLRLSCAASGFTFSSYFMSWVRQAPGKGLEWV |
| 271 | | SEISPSGSETYYADSVKGRFTISRDNSKNTLYLQMNSLRAEDTAVYYC |
| | | ARGRLLFDYWGQGTLVTVSS |
| IL1RL2- | 1062 | EVQLLESGGGLVQPGGSLRLSCAASGFTFSNSYISWVRQAPGKGLEWV |
| 272 | | SSISNSGGSTYYADSVKGRFTISRDNSKNTLYLQMNSLRAEDTAVYYC |
| | | AKNGITFDYWGQGTLVTVSS |
| IL1RL2- | 1063 | EVQLLESGGGLVQPGGSLRLSCAASGFTFDQYDMSWVRQAPGKGLEWV |
| 273 | | GISNSGSTSYNDSVKGRFTISRDNSKNTLYLQMNSLRAEDTAVYYCAR |
| | | WTSGLDYWGQGTLVTVSS |
| IL1RL2- | 1064 | EVQLLESGGGLVQPGGSLRLSCAASGFTFNHYGMGWVRQAPGKGLEWV |
| 274 | | SAISGSGDKTYYADSVKGRFTISRDNSKNTLYLQMNSLRAEDTAVYYC |
| | | AKSYLSGTFDYWGQGTLVTVSS |
| IL1RL2- | 1065 | EVQLLESGGGLVQPGGSLRLSCAASGFTFSSYWNHWVRQAPGKGLEWV |
| 275 | | STIGPSGTSTYYADSVKGRFTISRDNSKNTLYLQMNSLRAEDTAVYYC |
| | | AKAVRNFAFDYWGQGTLVTVSS |
| IL1RL2- | 1066 | EVQLLESGGGLVQPGGSLRLSCAASGFTFGDHGMGWVRQAPGKGLEWV |
| 276 | | GVIWGGGGTYYADSVKGRFTISRDNSKNTLYLQMNSLRAEDTAVYYCA |
| | | KSTPNIPLAYWGQGTLVTVSS |
| IL1RL2- | 1067 | EVQLLESGGGLVQPGGSLRLSCAASGFTFEQTDMHWVRQAPGKGLEWV |
| 277 | | SSISPNGWDTYYADSVKGRFTISRDNSKNTLYLQMNSLRAEDTAVYYC |
| | | AKSGTDFDYWGQGTLVTVSS |
| IL1RL2- | 1068 | EVQLLESGGGLVQPGGSLRLSCAASGFTFEQTDMHWVRQAPGKGLEWV |
| 278 | | SSISPNGWDTYYADSVKGRFTISRDNSKNTLYLQMNSLRAEDTAVYYC |
| | | ARDLGDYWGQGTLVTVSS |
| IL1RL2- | 1069 | EVQLLESGGGLVQPGGSLRLSCAASGFTVDTYAMTWVRQAPGKGLEWV |
| 279 | | SGITRSGSTNYRDSVKGRFTISRDNSKNTLYLQMNSLRAEDTAVYYCA |
| | | KGSGFDYWGQGTLVTVSS |
| IL1RL2- | 1070 | EVQLLESGGGLVQPGGSLRLSCAASGFTFNHYGMGWVRQAPGKGLEWV |
| 280 | | SGITRSGSTNYRDSVKGRFTISRDNSKNTLYLQMNSLRAEDTAVYYCA |
| | | KSTPNIPLAYWGQGTLVTVSS |
| IL1RL2- | 1071 | EVQLLESGGGLVQPGGSLRLSCAASGFTFSEYGMWWVRQAPGKGLEWV |
| 281 | | SEIDALGTDTYYADSVKGRFTISRDNSKNTLYLQMNSLRAEDTAVYYC |
| | | ASEQAGDYWGQGTLVTVSS |
| IL1RL2- | 1072 | EVQLLESGGGLVQPGGSLRLSCAASGFTFNHYGMGWVRQAPGKGLEWV |
| 282 | | SAISGSGGGTSYADSVKGRFTISRDNSKNTLYLQMNSLRAEDTAVYYC |
| | | AKSYLSGTFDYWGQGTLVTVSS |
| IL1RL2- | 1073 | EVQLLESGGGLVQPGGSLRLSCAASGFAFRSYAMSWVRQAPGKGLEWV |
| 283 | | SAITGSGTSTYYADSVKGRFTISRDNSKNTLYLQMNSLRAEDTAVYYC |
| | | ARDILWNYRVADYWGQGTLVTVSS |
| IL1RL2- | 1074 | EVQLLESGGGLVQPGGSLRLSCAASGFTFTSHAMSWVRQAPGKGLEWV |
| 284 | | SGISGSGANTYYADSVKGRFTISRDNSKNTLYLQMNSLRAEDTAVYYC |
| | | ARDGIVVVPAANHSYYYYYGMDVWGQGTLVTVSS |
| IL1RL2- | 1075 | EVQLLESGGGLVQPGGSLRLSCAASGFTFSNFAMSWVRQAPGKGLEWV |
| 285 | | STISGSGGSTSYADSVKGRFTISRDNSKNTLYLQMNSLRAEDTAVYYC |
| | | AREKRSSGWYPHFDYWGQGTLVTVSS |
| IL1RL2- | 1076 | EVQLLESGGGLVQPGGSLRLSCAASGFTLSDYAMSWVRQAPGKGLEWV |
| 286 | | STISGSAGSTYYADSVKGRFTISRDNSKNTLYLQMNSLRAEDTAVYYC |
| | | ARGRTPTTVTTKNDAFDIWGQGTLVTVSS |
| IL1RL2- | 1077 | EVQLLESGGGLVQPGGSLRLSCAASGFPLSSYAMSWVRQAPGKGLEWV |
| 287 | | SLISGSGVSTYYADSVKGRFTISRDNSKNTLYLQMNSLRAEDTAVYYC |
| | | ARGWGAAEEWGQGTLVTVSS |
| IL1RL2- | 1078 | EVQLLESGGGLVQPGGSLRLSCAASGFTFGSYTMNWVRQAPGKGLEWV |
| 288 | | SGISASGGNTYYADSVKGRFTISRDNSKNTLYLQMNSLRAEDTAVYYC |
| | | AKAMKLWPFDYWGQGTLVTVSS |
| IL1RL2- | 1079 | EVQLLESGGGLVQPGGSLRLSCAASGFTFTKYAMSWVRQAPGKGLEWV |
| 289 | | SGISGSGGYTYYADSVKGRFTISRDNSKNTLYLQMNSLRAEDTAVYYC |
| | | ARGAGSPDYWGQGTLVTVSS |
| IL1RL2- | 1080 | EVQLLESGGGLVQPGGSLRLSCAASGFAFRSYAMSWVRQAPGKGLEWV |
| 290 | | SAITGSGTSTYYADSVKGRFTISRDNSKNTLYLQMNSLRAEDTAVYYC |
| | | ARDILWNYHVADYWGQGTLVTVSS |
| IL1RL2- | 1081 | EVQLLESGGGLVQPGGSLRLSCAASGFTFSSYSMNWVRQAPGKGLEWV |
| 291 | | SLISSSGGSTYYADSVKGRFTISRDNSKNTLYLQMNSLRAEDTAVYYC |
| | | ARKRVPAAITKEHDAFDIWGQGTLVTVSS |
| IL1RL2- | 1082 | EVQLLESGGGLVQPGGSLRLSCAASGLTFNNYAMSWVRQAPGKGLEWV |
| 292 | | SGISGSSGNTYYVDSVKGRFTISRDNSKNTLYLQMNSLRAEDTAVYYC |
| | | ARGPNHGMFDAWGQGTLVTVSS |
| IL1RL2- | 1083 | EVQLLESGGGLVQPGGSLRLSCAASGFTISNYAMSWVRQAPGKGLEWV |
| 293 | | SGISGSGSSTFYADSVKGRFTISRDNSKNTLYLQMNSLRAEDTAVYYC |
| | | AKPDSGQWWGVDQWGQGTLVTVSS |
| IL1RL2- | 1084 | EVQLLESGGGLVQPGGSLRLSCAASGFPLSSYAMSWVRQAPGKGLEWV |
| 294 | | SLISGSGVSTYYADSVKGRFTISRDNSKNTLYLQMNSLRAEDTAVYYC |
| | | ARGWGAAEEWGQGTLVTVSS |
| IL1RL2- | 1085 | EVQLLESGGGLVQPGGSLRLSCAASGFSFTTYAMSWVRQAPGKGLEWV |
| 295 | | SGISGGGGSTYYADSVKGRFTISRDNSKNTLYLQMNSLRAEDTAVYYC |
| | | AKLVLSNRGGVDYWGQGTLVTVSS |
| IL1RL2- | 1086 | EVQLLESGGGLVQPGGSLRLSCAASGFIFSNFAMSWVRQAPGKGLEWV |
| 296 | | SGISGSGSSTNYADSVKGRFTISRDNSKNTLYLQMNSLRAEDTAVYYC |
| | | ARGFWSGYYGMDVWGQGTLVTVSS |
| IL1RL2- | 1087 | EVQLLESGGGLVQPGGSLRLSCAASGFTFRSHAMSWVRQAPGKGLEWV |
| 297 | | SALSGSGGRTYYADSVKGRFTISRDNSKNTLYLQMNSLRAEDTAVYYC |
| | | ASSGAGVSDYWGQGTLVTVSS |
| IL1RL2- | 1088 | EVQLLESGGGLVQPGGSLRLSCAASGFTFPSYAMAWVRQAPGKGLEWV |
| 298 | | SAISGSGSSPYYADSVKGRFTISRDNSKNTLYLQMNSLRAEDTAVYYC |
| | | AREKRSSGWYPHFDYWGQGTLVTVSS |
| IL1RL2- | 1089 | EVQLLESGGGLVQPGGSLRLSCAASGFIFSRYAMSWVRQAPGKGLEWV |
| 299 | | SAISESGGNTYYADSVKGRFTISRDNSKNTLYLQMNSLRAEDTAVYYC |
| | | ARQRYPGGSGSYADYWGQGTLVTVSS |
| IL1RL2- | 1090 | EVQLLESGGGLVQPGGSLRLSCAASGFTFSGYAMNWVRQAPGKGLEWV |
| 300 | | STISGSGVSTYYADSVKGRFTISRDNSKNTLYLQMNSLRAEDTAVYYC |
| | | AREQHLVEGDFDNWGQGTLVTVSS |
| IL1RL2- | 1091 | EVQLLESGGGLVQPGGSLRLSCAASGFPLSSYAMSWVRQAPGKGLEWV |
| 301 | | SLISGSGVSTYYADSVKGRFTISRDNSKNTLYLQMNSLRAEDTAVYYC |
| | | ARGWGAAEEWGQGTLVTVSS |
| IL1RL2- | 1092 | EVQLLESGGGLVQPGGSLRLSCAASGFPLSSYAMSWVRQAPGKGLEWV |
| 302 | | SLISGSGVSTYYADSVKGRFTISRDNSKNTLYLQMNSLRAEDTAVYYC |
| | | ARGWGAAEEWGQGTLVTVSS |
| IL1RL2- | 1093 | EVQLLESGGGLVQPGGSLRLSCAASGFTFSGYAMNWVRQAPGKGLEWV |
| 303 | | STISGSGVSTYYADSVKGRFTISRDNSKNTLYLQMNSLRAEDTAVYYC |
| | | AREQHLVEGDFDNWGQGTLVTVSS |
| IL1RL2- | 1094 | EVQLLESGGGLVQPGGSLRLSCAASGITFSNYAVSWVRQAPGKGLEWV |
| 304 | | SSISGSAGSTYYADSVKGRFTISRDNSKNTLYLQMNSLRAEDTAVYYC |
| | | AKDRVPGTVTGRPDAFDIWGQGTLVTVSS |
| IL1RL2- | 1095 | EVQLLESGGGLVQPGGSLRLSCAASGITFSNYAVSWVRQAPGKGLEWV |
| 305 | | SSISGSAGSTYYADSVKGRFTISRDNSKNTLYLQMNSLRAEDTAVYYC |
| | | AKDRVPGTVTGRPDAFDIWGQGTLVTVSS |
| IL1RL2- | 1096 | EVQLLESGGGLVQPGGSLRLSCAASGFTFSSYSMNWVRQAPGKGLEWV |
| 306 | | SISSSGGSTYYADSVKGRFTISRDNSKNTLYLQMNSLRAEDTAVYYCA |
| | | RKRVPAAITKEHDAFDIWGQGTLVTVSS |
| IL1RL2- | 1097 | EVQLLESGGGLVQPGGSLRLSCAASGFTFSSYAMSWVRQAPGKGLEWV |
| 307 | | SVISGSGGRTDYADSVKGRFTISRDNSKNTLYLQMNSLRAEDTAVYYC |
| | | ARFSLSAAFDIWGQGTLVTVSS |
| IL1RL2- | 1098 | EVQLLESGGGLVQPGGSLRLSCAASGFTFTNHAMSWVRQAPGKGLEWV |
| 308 | | SGISGSGRSTYYADSVKGRFTISRDNSKNTLYLQMNSLRAEDTAVYYC |
| | | ARSGLRRLATFDYWGQGTLVTVSS |
| IL1RL2- | 1099 | EVQLLESGGGLVQPGGSLRLSCAASGFSFINYAMSWVRQAPGKGLEWV |
| 309 | | SAISGSGSSPYYADSVKGRFTISRDNSKNTLYLQMNSLRAEDTAVYYC |
| | | AREKRSSGWYPHFDYWGQGTLVTVSS |
| IL1RL2- | 1100 | EVQLLESGGGLVQPGGSLRLSCAASGITFSNYAVSWVRQAPGKGLEWV |
| 310 | | SSISGSGSSTYHADSVKGRFTISRDNSKNTLYLQMNSLRAEDTAVYYC |
| | | ARTVPGTYSFNYWGQGTLVTVSS |
| IL1RL2- | 1101 | EVQLLESGGGLVQPGGSLRLSCAASGFTISNYAMSWVRQAPGKRLEWV |
| 311 | | SGISGSGSSTFYADSVKGRFTISRDNSKNTLYLQMNSLRAEDTAVYYC |
| | | AKPDSGQWWGVDQWGQGTLVTVSS |
| IL1RL2- | 1102 | EVQLLESGGGLVQPGGSLRLSCAASGFAFSRYAMAWVRQAPGKGLEWV |
| 312 | | SVISGGGGSTDYADSVKGRFTISRDNSKNTLYLQMNSLRAEDTAVYYC |
| | | ARFGALAAFAADYWGQGTLVTVSS |
| IL1RL2- | 1103 | EVQLLESGGGLVQPGGSLRLSCAASGFTVSSSAMSWVRQAPGKGLEWV |
| 313 | | SGISGSGGSTDYADSVKGRFTISRDNSKNTLYLQMNSLRAEDTAVYYC |
| | | AKRDGYNSERDWGQGTLVTVSS |
| IL1RL2- | 1104 | EVQLLESGGGLVQPGGSLRLSCAASGFTFNKYAMSWVRQAPGKGLEWV |
| 314 | | SSIGGSGGTTYYADSVKGRFTISRDNSKNTLYLQMNSLRAEDTAVYYC |
| | | ARGRFSSGWPHDFDIWGQGTLVTVSS |
| IL1RL2- | 1105 | EVQLLESGGGLVQPGGSLRLSCAASGFSFINYAMSWVRQAPGKGLEWV |
| 315 | | SAISGSGSSPYYADSVKGRFTISRDNSKNTLYLQMNSLRAEDTAVYYC |
| | | AREKRSSGWYPHFDYWGQGTLVTVSS |
| IL1RL2- | 1106 | EVQLLESGGGLVQPGGSLRLSCAASGFTFRSHAMSWVRQAPGKGLEWV |
| 316 | | SALSGSGGRTYYADSVKGRFTIPRDNSKNTLYLQMNSLRAEDTAVYYC |
| | | ASSGAGVSDYWGQGTLVTVSS |
| IL1RL2- | 1107 | EVQLLESGGGLVQPGGSLRLSCAASGFAFRSYAMSWVRQAPGKGLEWV |
| 317 | | SAITGSGTSTYYADSVKGRFTISRDNSKNTLYLQMNSLRAEDTAVYYC |
| | | AREKRSSGWYPHFDYWGQGTLVTVSS |
| IL1RL2- | 1108 | EVQLLESGGGLVQPGGSLRLSCAASGFTFGRYAMTWVRQAPGKGLEWV |
| 318 | | STISGSGGTTHYADSVKGRFTISRDNSKNTLYLQMNSLRAEDTAVYYC |
| | | ARTPAARFDAFDIWGQGTLVTVSS |
| IL1RL2- | 1109 | EVQLLESGGGLVQPGGSLRLSCAASGLTFSTYAMSWVRQAPGKGLEWV |
| 319 | | STITGSGGSTYYADSVKGRFTISRDNSKNTLYLQMNSLRAEDTAVYYC |
| | | AKDRVPGTVTGRPDAFDIWGQGTLVTVSS |
| IL1RL2- | 1110 | EVQLLESGGGLVQPGGSLRLSCAASGFTLSDYAMSWVRQAPGKGLEWV |
| 320 | | STISGSAGSTYYADSVKGRFTISRDNSKNTLYLQMNSLRAEDTAVYYC |
| | | ARGWGAAEEWGQGTLVTVSS |
| IL1RL2- | 1111 | EVQLLESGGGLVQPGGSLRLSCAASGITFSNYAVSWVRQAPGKGLEWV |
| 321 | | SSISGSAGSTYYADSVKGRFTISRDNSKNTLYLQMNSLRAEDTAVYYC |
| | | AKDRVPGTVTGRPDAFDIWGQGTLVTVSS |
| IL1RL2- | 1112 | EVQLLESGGGLVQPGGSLRLSCAASGFTLSSYAMTWVRQAPGKGLEWV |
| 322 | | SGISGSGGSTDYADSVKGRFTISRDNSKNTLYLQMNSLRAEDTAVYYC |
| | | ARKRVPAAITKEHDAFDIWGQGTLVTVSS |
| IL1RL2- | 1113 | EVQLLESGGGLVQPGGSLRLSCAASGFAFSRYAMSWVRQAPGKGLEWV |
| 323 | | SAISSSGSSTYYADSVKGRFTISRDNSKNTLYLQMNSLRAEDTAVYYC |
| | | ARVIGYYDSSGYYSHDAFDIWGQGTLVTVSS |
| IL1RL2- | 1114 | EVQLLESGGGLVQPGGSLRLSCAASGFTLSDYAMSWVRQAPGKGLEWV |
| 324 | | STISGSAGSTYYADSVKGRFTISRDNSKNTLYLQMNSLRAEDTAVYYC |
| | | ARDILWNYRVADYWGQGTLVTVSS |
| IL1RL2- | 1115 | EVQLLESGGGLVQPGGSLRLSCAASGFTFSNYAMSWVRQAPGKGLEWV |
| 325 | | SAISGSGGSTYYPDSVKGRFTISRDNSKNTLYLQMNSLRAEDTAVYYC |
| | | ARLTRGPWHFDLWGQGTLVTVSS |
| IL1RL2- | 1116 | EVQLLESGGGLVQPGGSLRLSCAASGFAFSSYGMSWVRQAPGKGLEWV |
| 326 | | SGISGSGGNTFYADSVKGRFTISRDNSKNTLYLQMNSLRAEDTAVYYC |
| | | AREKRSSGWYPHFDYWGQGTLVTVSS |
| IL1RL2- | 1117 | EVQLLESGGGLVQPGGSLRLSCAASGFIFSNYAMSWVRQAPGKGLEWV |
| 327 | | SVISGSGGRTDYADSVKGRFTISRDNSKNTLYLQMNSLRAEDTAVYYC |
| | | ARHGVGSAGMDVWGQGTLVTVSS |
| IL1RL2- | 1118 | EVQLLESGGGLVQPGGSLRLSCAASGFMFSDYAMSWVRQAPGKGLEWV |
| 328 | | SLTSGSGSNTYYADSVKGRFTISRDNSKNTLYLQMNSLRAEDTAVYYC |
| | | ARGHNDFLAGYSDYFDYWGQGTLVTVSS |
| IL1RL2- | 1119 | EVQLLESGGGLVQPGGSLRLSCAASGITFSNYAVSWVRQAPGKGLEWV |
| 329 | | SSISGSAGSTYYADSVKGRFTISRDNSKNTLYLQMNSLRAEDTAVYYC |
| | | AKDRVPGTVTGRPDAFDIWGQGTLVTVSS |
| IL1RL2- | 1120 | EVQLLESGGGLVQPGGSLRLSCAASGITFSSSAMSWVRQAPGKGLEWV |
| 330 | | SGISGSGGRTNYADSVKGRFTISRDNSKNTLYLQMNSLRAEDTAVYYC |
| | | ARDITHYYGSGSSFYYYYSAMDVWGQGTLVTVSS |
| IL1RL2- | 1121 | EVQLLESGGGLVQPGGSLRLSCAASGFTFGNYAMSWVRQAPGKGLEWV |
| 331 | | SVISGSGGRTDYADSVKGRFTISRDNSKNTLYLQMNSLRAEDTAVYYC |
| | | AKGGIGSIGLHYWGQGTLVTVSS |
| IL1RL2- | 1122 | EVQLLESGGGLVQPGGSLRLSCAASGFALSSYAMSWVRQAPGKRLEWV |
| 332 | | SAISGSGGSTSYADSVKGRFTISRDNSKNTLYLQMNSLRAEDTAVYYC |
| | | AKHIGGWYTWDFWGQGTLVTVSS |
| IL1RL2- | 1123 | EVQLLESGGGLVQPGGSLRLSCAASGFTFRSSAMSWVRQAPGKGLEWV |
| 333 | | SAISGSGTNTYYVDSVKGRFTISRDNSKNTLYLQMNSLRAEDTAVYYC |
| | | VKDLGIGDSDYWGQGTLVTVSS |
| IL1RL2- | 1124 | EVQLLESGGGLVQPGGSLRLSCAASGFIFRSYAMSWVRQAPGKGLEWV |
| 334 | | SVISGSGGRTDYADSVKGRFTISRDNSKNTLYLQMNSLRAEDTAVYYC |
| | | ARMKAAAGTISFDYWGQGTLVTVSS |
| IL1RL2- | 1125 | EVQLLESGGGLVQPGGSLRLSCAASGFTISSSAMNWVRQAPGKGLEWV |
| 335 | | SAISGSGSGTYYTDSVKGRFTISRDNSKNTLYLQMNSLRAEDTAVYYC |
| | | GRREGGRYNDAFDIWGQGTLVTVSS |
| IL1RL2- | 1126 | EVQLLESGGGLVQPGGSLRLSCAASGFTFRSHAMSWVRQAPGKGLEWV |
| 336 | | SALSGSGGRTYYADSVKGRFTISRDNSKNTLYLQMNSLRAEDTAVYYC |
| | | ARGWGAAEEWGQGTLVTVSS |
| IL1RL2- | 1127 | EVQLLESGGGLVQPGGSLRLSCAASGFTLTNYAMSWVRQAPGKGLEWV |
| 337 | | SSIRGSGGSTHYVDSVKGRFTISRDNSKNTLYLQMNSLRAEDTAVYYC |
| | | ARVIGYYDSSGYYSHDAFDIWGQGTLVTVSS |
| IL1RL2- | 1128 | EVQLLESGGGLVQPGGSLRLSCAASGLTFSNFAMSWVRQAPGKGLEWV |
| 338 | | SHISGRGGSTFYADSVKGRFTISRDNSKNTLYLQMNSLRAEDTAVYYC |
| | | ARGGRIWWALDVWGQGTLVTVSS |
| IL1RL2- | 1129 | EVQLLESGGGLVQPGGSLRLSCAASGFTFDTYAMTWVRQAPGKGLEWV |
| 339 | | STISGSGGSAYYADSVKGRFTISRDNSKNTLYLQMNSLRAEDTAVYYC |
| | | ARLRHWGSAAFEIWGQGTLVTVSS |
| IL1RL2- | 1130 | EVQLLESGGGLVQPGGSLRLSCAASGFTFSGYAMNWVRQAPGKGLEWV |
| 340 | | STISGSGVSTYYADSVKGRFTISRDNSKNTLYLQMNSLRAEDTAVYYC |
| | | AREQHLVEGDFDNWGQGTLVTVSS |
| IL1RL2- | 1131 | EVQLLESGGGLVQPGGSLRLSCAASGFTLSDYAMSWVRQAPGKGLEWV |
| 341 | | STISGSAGSTYYADSVKGRFTISRDNSKNTLYLQMNSLRAEDTAVYYC |
| | | ARAHDYDSMLMDYWGQGTLVTVSS |
| IL1RL2- | 1132 | EVQLLESGGGLVQPGGSLRLSCAASGFTFGTYVMSWVRQAPGKGLEWV |
| 342 | | SSITGSGGTTYYADSVKGRFTISRDNSKNTLYLQMNSLRAEDTAVYYC |
| | | ARGRQTGFDYWGQGTLVTVSS |
| IL1RL2- | 1133 | EVQLLESGGGLVQPGGSLRLSCAASGFPFGSYAMNWVRQAPGKGLEWV |
| 343 | | SAIGGSGGSTYYADSVKGRFTISRDNSKNTLYLQMNSLRAEDTAVYYC |
| | | ARKRVPTTVTTQTDAFDIWGQGTLVTVSS |
| IL1RL2- | 1134 | EVQLLESGGGLVQPGGSLRLSCAASGFTFRSHAMSWVRQAPGKGLEWV |
| 344 | | SAISGSGSSPYYADSVKGRFTISRDNSKNTLYLQMNSLRAEDTAVYYC |
| | | AREKRSSGWYPHFDYWGQGTLVTVSS |
| IL1RL2- | 1135 | EVQLLESGGGLVQPGGSLRLSCAASGFAFSSYAMNWVRQAPGKGLEWV |
| 345 | | SAISGGGGGTYYADSVKGRFTISRDNSKNTLYLQMNSLRAEDTAVYYC |
| | | ARHNYGDYYGMDVWGQGTLVTVSS |
| IL1RL2- | 1136 | EVQLLESGGGLVQPGGSLRLSCAASGFTFRSHAMSWVRQAPGKGLEWV |
| 346 | | SALSGSGGRTYYADSVKGRFTISRDNSKNTLYLQMNSLRAEDTAVDYC |
| | | ASSGAGVSDYWGQGTLVTVSS |
| IL1RL2- | 1137 | EVQLLESGGGLVQPGGSLRLSCAASGFTFSGYAMNWVRQAPGKGLEWV |
| 347 | | STISGSGVSTYYADSVKGRFTISRDNSKNTLYLQMNSLRAEDTAVYYC |
| | | AREQHLVEGDFDNWGQGTLVTVSS |
| IL1RL2- | 1138 | EVQLLESGGGLVQPGGSLRLSCAASGFTFRDYAMTWVRQAPGKGLEWV |
| 348 | | SSISESGGSTYYADSVKGRFTISRDNSKNTLYLQMNSLRAEDTAVYYC |
| | | ARLDAIKYSYGYYYYYGMDVWGQGTLVTVSS |
| IL1RL2- | 1139 | EVQLLESGGGLVQPGGSLRLSCAASGFTLSSYAMTWVRQAPGKGLEWV |
| 349 | | SGISGSGGSTDYADSVKGRFTISRDNSKNTLYLQMNSLRAEDTAVYYC |
| | | ARKRVPAAITKEHDAFDIWGQGTLVTVSS |
| IL1RL2- | 1140 | EVQLLESGGGLVQPGGSLRLSCAASGFTFSNYGMNWVRQAPGKGLEWV |
| 350 | | SGISGSGGSTDYADSVKGRFTISRDNSKNTLYLQMNSLRAEDTAVYYC |
| | | ARVGATPFDYWGQGTLVTVSS |
| IL 1RL2- | 1141 | EVQLLESGGGLVQPGGSLRLSCAASGVTFSSYAMSWVRQAPGKGLEWV |
| 351 | | SGISGGGDITYYADSVKGRFTISRDNSKNTLYLQMNSLRAEDTAVYYC |
| | | TRAQRYESRGRAYYYMDVWGQGTLVTVSS |
| IL1RL2- | 1142 | EVQLLESGGGLVQPGGSLRLSCAASGFTFSKFAMTWVRQAPGKGLEWV |
| 352 | | STISGSVGSTYYADSVKGRFTISRDNSKNTLYLQMNSLRAEDTAVYYC |
| | | ARSRRSYSSGWSIDYWGQGTLVTVSS |
| IL1RL2- | 1143 | EVQLLESGGGLVQPGGSLRLSCAASGFTFTSHAMSWVRQAPGKGLEWV |
| 353 | | SAITGSGTSTYYADSVKGRFTISRDNSKNTLYLQMNSLRAEDTAVYYC |
| | | ARDILWNYRVADYWGQGTLVTVSS |
| IL1RL2- | 1144 | EVQLLESGGGLVQPGGSLRLSCAASGFTFRRYAMSWVRQAPGKGLEWV |
| 354 | | SAITGSGGGTYYADSVKGRFTISRDNSKNTLYLQMNSLRAEDTAVYYC |
| | | ARHVSWGWLDPWGQGTLVTVSS |
| IL1RL2- | 1145 | EVQLLESGGGLVQPGGSLRLSCAASGFTFSSSAMGWVRQAPGKGLEWV |
| 355 | | SLISGSGGSTNYADSVKGRFTISRDNSKNTLYLQMNSLRAEDTAVYYC |
| | | ARVVGATTFDYWGQGTLVTVSS |
| IL1RL2- | 1146 | EVQLLESGGGLVQPGGSLRLSCAASGFTVSSSAMSWVRQAPGKGLEWV |
| 356 | | SGISGSGGSTDYADSVKGRFTISRDNSKNTLYLQMNSLRAEDTAVYYC |
| | | AKRDGYNSERDWGQGTLVTVSS |
| IL1RL2- | 1147 | EVQLLESGGGLVQPGGSLRLSCAASGITFSSYAMSWVRQAPGKGLEWV |
| 357 | | SGITGSGGNTYYADSVKGRFTISRDNSKNTLYLQMNSLRAEDTAVYYC |
| | | AGGSWFDPWGQGTLVTVSS |
| IL1RL2- | 1148 | EVQLLESGGGLVQPGGSLRLSCAASGFSFINYAMSWVRQAPGKGLEWV |
| 358 | | SAISGSGSSPYYADSVKGRFTISRDNSKNTLYLQMNSLRAEDTAVYYC |
| | | AREKRSSGWYPHFDYWGQGTLVTVSS |
| IL1RL2- | 1149 | EVQLLESGGGLVQPGGSLRLSCAASGFTFSTSAMGWVRQAPGKGLEWV |
| 359 | | STISGSGGSTYYADSVKGRFTISRDNSKNTLYLQMNSLRAEDTAVYYC |
| | | AKDRVFYSSGAFDSWGQGTLVTVSS |
| IL1RL2- | 1150 | EVQLLESGGGLVQPGGSLRLSCAASGITFSNYAVSWVRQAPGKGLEWV |
| 360 | | SSISGSAGSTYYADSVKGRFTISRDNSKNTLYLQMNSLRAEDTAVYYC |
| | | AKDRVPGTVTGRPDAFDIWGQGTLVTVSS |
| IL1RL2- | 1151 | EVQMLESGGGLVQPGGSLRLSCAASGFTFYNYAMSWVRQAPGKGLEWV |
| 361 | | SDISGSGGSTSYADSVKGRFTISRDNSKNTLYLQMNSLRAEDTAVYYC |
| | | AKGVVPAAIGGAFDPWGQGTLVTVSS |
| IL1RL2- | 1152 | EVQLLESGGGLVQPGGSLRLSCAASGFTFRSHAMSWVRQAPGKGLELV |
| 362 | | SALSGSGGRTYYADSVKGRFTISRDNSKNTLYLQMNSLRAEDTAVYYC |
| | | ASSGAGVSDYWGQGTLVTVSS |
| IL1RL2- | 1153 | EVQLLESGGGLVQPGGSLRLSCAASGFAFSSYAMNWVRQAPGKGLEWV |
| 363 | | SGISGGGGSTYYADSVKGRFTISRDNSKNTLYLQMNSLRAEDTAVYYC |
| | | ARAGLQRINSYYYYYGMDVWGQGTLVTVSS |
| IL1RL2- | 1154 | EVQLLESGGGLVQPGGSLRLSCAASGFTFSGYTMNWVRQAPGKGLEWV |
| 364 | | SSISGSGGKTYYADSVKGRFTISRDNSKNTLYLQMNSLRAEDTAVYYC |
| | | ARHLTSGWYIFDYWGQGTLVTVSS |
| IL1RL2- | 1155 | EVQLLESGGGLVQPGGSLRLSCAASGFAFRSYAMSWVRQAPGKGLEWV |
| 365 | | SAITGSGTSTYYADSVKGRFTISRDNSKNTLYLQMNSLRAEDTAVYYC |
| | | ASSGAGVSDYWGQGTLVTVSS |
| IL1RL2- | 1156 | EVQLLESGGGLVQPGGSLRLSCAASGFTFSNFAMSWVRQAPGKGLEWV |
| 366 | | SLISGSGVSTYYADSVKGRFTISRDNSKNTLYLQMNSLRAEDTAVYYC |
| | | ARGWGAAEEWGQGTLVTVSS |
| IL1RL2- | 1157 | EVQLLESGGGLVQPGGSLRLSCAASGFPLSSYAMSWVRQAPGKGLEWV |
| 367 | | SSITSEGGSTYYADSVKGRFTISRDNSKNTLYLQMNSLRAEDTAVYYC |
| | | AKPDVLFDYWGQGTLVTVSS |
| IL1RL2- | 1158 | EVQLLESGGGLVQPGGSLRLSCAASGFSFSRYAMNWVRQAPGKGLEWV |
| 368 | | SAISGSGGTTFYADSVKGRFTISRDNSKNTLYLQMNSLRAEDTAVYYC |
| | | AKDGVFRLGSYYFDSWGQGTLVTVSS |
| IL1RL2- | 1159 | EVQLLESGGGLVQPGGSLRLSCAASGFTFSDYDMSWVRQAPGKGLEWV |
| 369 | | SSLSGSGGATYYADSVKGRFTISRDNSKNTLYLQMNSLRAEDTAVYYC |
| | | ARGYYGMDVWGQGTLVTVSS |
| IL1RL2- | 1160 | EVQLLESGGGLVQPGGSLRLSCAASGFTFSSYAMSWVRQAPGKGLEWV |
| 370 | | SVISGSGGRTDYADSVKGRFTISRDNSKNTLYLQMNSLRAEDTAVYYC |
| | | ARFSLSAAFDIWGQGTLVTVSS |
| IL1RL2- | 1161 | EVQLLESGGGLVQPGGSLRLSCAASGFPFSSHAMSWVRQAPGKGLEWV |
| 371 | | SSISESGGSTYYADSVKGRFTISRDNSKNTLYLQMNSLRAEDTAVYYC |
| | | ARDKGRAYCSGGICYSGWDWFDPWGQGTLVTVSS |
| IL1RL2- | 1162 | EVQLLESGGGLVQPGGSLRLSCAASGFTFRSHAMSWVRQAPGKGLEWV |
| 372 | | SALSGSGGRTYYADSVKGRFTISRDNSKNTLYLQMNSLRAEDTAVYYC |
| | | ARDILWNYRVADYWGQGTLVTVSS |
| IL1RL2- | 1163 | EVQLLESGGGLVQPGGSLRLSCAASGFTFTNHAMSWVRQAPGKGLEWV |
| 373 | | SGISGSGRSTYYADSVKGRFTISRDNSKNTLYLQMNSLRAEDTAVYYC |
| | | ARSGLRRLATFDYWGQGTLVTVSS |
| IL1RL2- | 1164 | EVQLLESGGGLVQPGGSLRLSCAASGFPLSSYAMSWVRQAPGKGLEWV |
| 374 | | SLISGSGVSTYYADSVKGRFTISGDNSKNTLYLQMNSLRAEDTAVYYC |
| | | AKAMKLWPFDYWGQGTLVTVSS |
| IL1RL2- | 1165 | EVQLLESGGGLVQPGGSLRLSCAASGFTFSNFPMSWVRQAPGKGLEWV |
| 375 | | SGISGSGETTYYADSVKGRFTISRDNSKNTLYLQMNSLRAEDTAVYYC |
| | | ARRGAMDVWGQGTLVTVSS |
| IL1RL2- | 1166 | EVQLLESGGGLVQPGGSLRLSCAASGFTFRSHAMSWVRQAPGKGLEWV |
| 376 | | SALSGSGGNTYYADSVKGRFTISRDNSKNTLYLQMNSLRAEDTAVYYC |
| | | AKAMKLWPFDYWGQGTLVTVSS |
| IL1RL2- | 1167 | EVQLLESGGGLVQPGGSLRLSCAASGLTFNNYAMSWVRQAPGKGLEWV |
| 377 | | SGISGSSGNTYYVDSVKGRFTISRDNSKNTLYLQMNSLRAEDTAVYYC |
| | | ASSGAGVSDYWGQGTLVTVSS |
| IL1RL2- | 1168 | EVQLLESGGGLVQPGGSLRLSCAASGFTFNNYAMSWVRQAPGKGLEWV |
| 378 | | SAISGSGARTYYADSVKGRFTISRDNSKNTLYLQMNSLRAEDTAVYYC |
| | | AKDRVPGTVTGRPDAFDIWGQGTLVTVSS |
| IL1RL2- | 1169 | EVQLLESGGGLVQPGGSLRLSCAASGFTLSDYAMSWVRQAPGKGLEWV |
| 379 | | STISGSAGSTYYADSVKGRFTISRDNSKNTLYLQMNSLRAEDTAVYYC |
| | | TPSGAGVSDYWGQGTLVTVSS |
| IL1RL2- | 1170 | EVQLLESGGGSVQPGGSLRLSCAASGFTFSSYALNWVRQAPGKGLEWV |
| 380 | | SGISGSGGRTYYADSVKGRFTISRDNSKNTLYLQMNSLRAEDTAVYYC |
| | | ARMPNYGYYFDFWGQGTLVTVSS |
| IL1RL2- | 1171 | EVQLLESGGGLVQPGGSLRLSCAASGFTFRSLAMTWVRQAPGKGLEWV |
| 381 | | SVISGSGGRTDYADSVKGRFTISRDNSKNTLYLQMNSLRAEDTAVYYC |
| | | ARSSRLDYWGQGTLVTVSS |
| IL1RL2- | 1172 | EVQLLESGGGLVQPGGSLRLSCAASGFSLSSYAMSWVRQAPGKGLEWV |
| 382 | | SGISGSGGRTNYADSVKGRFTISRDNSKNTLYLQMNSLRAEDTAVYYC |
| | | ARDECTSSSCYAGSSAVDYWGQGTLVTVPS |
| IL1RL2- | 1173 | EVQLLESGGGLVQPGGSLRLSCAASGFAFRSYAMSWVRQAPGKGLEWV |
| 383 | | SGISGSSGNTYYVDSVKGRFTISRDNSKNTLYLQMNSLRAEDTAVYYC |
| | | ARGPNHGMFDAWGQGTLVTVSS |
| IL1RL2- | 1174 | EVQLLESGGGLVQPGGSLRLSCAASGFTFNNYAMSWVRQAPGKGLEWV |
| 384 | | SAISGSGARTYYADSVKGRFTISRDNSKNTLYLQMNSLRAEDTAVYYC |
| | | AKDRVPGTVTGRPDAFDIWGQGTLVTVSS |
| IL1RL2- | 1175 | EVQLLESGGGLVQPGGSLRLSCAASGFTFSSYALAWVRQAPGKGLEWV |
| 385 | | SAISGSAGRTYYADSVKGRFTISRDNSKNTLYLQMNSLRAEDTAVYYC |
| | | AIGLGYNWFDPWGQGTLVTVSS |
| IL1RL2- | 1176 | EVQLLESGGGLVQPGGSLRLSCAASGFTFRNYAMNWVRQAPGKGLEWV |
| 386 | | AAISGSGGRTYYADSVKGRFTISRDNSKNTLYLQMNSLRAEDTAVYYC |
| | | AREQHLVEGDFDYWGQGTLVTVSS |
| IL1RL2- | 1177 | EVQLLESGGGLVQPGGSLRLSCAASGFTFTSHAMSWVRQAPGKGLEWV |
| 387 | | SGISGSGANTYYADSVKGRFTISRDNSKNTLYLQMNSLRAEDTAVYYC |
| | | ARDGIVVVPAANHSYYYYYGMDVWGQGTLITVSS |
| IL1RL2- | 1178 | EVQLLESGGGLVQPGGSLRLSCAASGFTFSSYAMSWVRQAPGKGLEWV |
| 388 | | SVISGSGGRTDYADSVKGRFTISRDNSKNTLYLQMNSLRAEDTAVYYC |
| | | ARFSLSAAFDIWGQGTLVTVSS |
| IL1RL2- | 1179 | EVQLLESGGGLVQPGGSLRLSCAASGFTFSSYSMNWVRQAPGKGLEWV |
| 389 | | SISSSGGSTYYADSVKGRFTISRDNSKNTLYLQMNSLRAEDTAVYYCA |
| | | RKRVPAAITKEHDAFDIWGOGTLVTVSS |
| IL1RL2- | 1180 | EVQLLESGGGLVQPGGSLRLSCAASGFPFGSYAMNWVRQAPGKGLEWV |
| 390 | | SAIGGSGGSTYYADSVKGRFTISRDNSKNTLYLQMNSLRAEDTAVYYC |
| | | ASSGAGVSDYWGQGTLVTVSS |
| IL1RL2- | 1181 | EVQLLESGGGLVQPGGSLRLSCAASGITFSNYAVSWVRQAPGKGLEWV |
| 391 | | SSISGSAGSTYYADSVKGRFTISRDNSKNTLYLQMNSLRAEDTAVYYC |
| | | AKDRVPGTVTGRPDAFDIWGQGTLVTVSS |
| IL1RL2- | 1182 | EVQLLESGGGLVQPGGSLRLSCAASGFTFTNHAMSWVRQAPGKGLEWV |
| 392 | | SGISGSGRSTYYADSVKGRFTISRDNSKNTLYLQMNSLRAEDTAVYYC |
| | | ARSGLRRLATFDYWGQGTLVTVSS |
| IL1RL2- | 1183 | EVQLLESGGGLVQPGGSLRLSCAASGFTFGRFAMSWVRQAPGKGLEWV |
| 393 | | SAVSGSGGSTHYADSVKGRFTISRDNSKNTLYLQMNSLRAEDTAVYYC |
| | | ARVGGRRNKFDYWGQGTLVTVSS |
| IL1RL2- | 1184 | EVQLLESGGGLVQPGGSLRLSCAASGFTFSGYAMNWVRQAPGKGLEWV |
| 394 | | STISGSGVSTYYADSVKGRFTISRDNSKNTLYLQMNSLRAEDTAVYYC |
| | | AREQHLVEGDFDNWGQGTLVTVSS |
| IL1RL2- | 1185 | EVQLLESGGGLVQPGGSLRLSCAASGFTFSSYSMNWVRQAPGKGLEWV |
| 395 | | SISSSGGSTYYADSVKGRFTISRDNSKNTLYLQMNSLRAEDTAVYYCA |
| | | RKRVPAAITKEHDAFDIWGQGTLVTVSS |
| IL1RL2- | 1186 | EVQLLESGGGLVQPGGSLRLSCAASGITFSNYAVSWVRQAPGKGLEWV |
| 396 | | SSISGSAGSTYYADSVKGRFTISRDNSKNTLYLQMNSLRAEDTAVYYC |
| | | AKDRVPGTVTGRPDAFDIWGQGTLVTVSS |
| IL1RL2- | 1187 | EVQLLESGGVLVQPGGSLRLSCAASGFTFGNYAMTWVRQAPGKGLEWV |
| 397 | | SAITGSGGRTNYADSVKGRFTISRDNSKNTLYLQMNSLRAEDTAVYYC |
| | | ARGSRIAASGDYWGQGTLVTVSS |

TABLE 11
CD40L Variable Heavy Chain Domain Sequences

| CD40L | SEQ ID | |
|---|---|---|
| Variant | NO | VH Sequence |
| CD40L-1 | 1188 | EVQLVESGGGLVQPGGSLRLSCAASGRTFSSIYAMGWFRQAPGKEREF |
| | | IAVIYWRDGSTLYADSVKGRFTISADNSKNTAYLQMNSLKPEDTAVYY |
| | | CAAEPYGSGSSLISEYDWGQGTLVTVSS |
| CD40L-2 | 1189 | EVQLVESGGGLVQPGGSLRLSCAASGGRTFSRYDMGWFRQAPGKEREF |
| | | VAAISMSGDDAAYADSVKGRFTISADNSKNTAYLQMNSLKPEDTAVYY |
| | | CASDHYDTDTKSDVYNWGQGTLVTVSS |
| CD40L-3 | 1190 | EVQLVESGGGLVQPGGSLRLSCAASGRIFSTYFMGWFRQAPGKEREWV |
| | | SSIYSDGSTTDYADSVKGRFTISADNSKNTAYLQMNSLKPEDTAVYYC |
| | | AAWLNGGNRWGQGTLVTVSS |
| CD40L-4 | 1191 | EVQLVESGGGLVQPGGSLRLSCAASGFTLDYYAMGWFRQAPGKEREFV |
| | | AYVFGGGEITDYADSVKGRFTISADNSKNTAYLQMNSLKPEDTAVYYC |
| | | ANGNGVAETWGQGTLVTVSS |
| CD40L-5 | 1192 | EVQLVESGGGLVQPGGSLRLSCAASGLLFSSYDMGWFRQAPGKEREFV |
| | | AAIDASGGFTEYADSVKGRFTISADNSKNTAYLQMNSLKPEDTAVYYC |
| | | ASDHYDTDTKSDVYNWGQGTLVTVSS |
| CD40L-6 | 1193 | EVQLVESGGGLVQPGGSLRLSCAASGSIDNIHAMGWFRQAPGKEREFI |
| | | AVIYWRDGSSLYADSVKGRFTISADNSKNTAYLQMNSLKPEDTAVYYC |
| | | AAEPYGSGSSLISEYDWGQGTLVTVSS |
| CD40L-7 | 1194 | EVQLVESGGGLVQPGGSLRLSCAASGHTFSSYYMGWFRQAPGKEREFV |
| | | AAIYSGGITTHYADSVKGRFTISADNSKNTAYLQMNSLKPEDTAVYYC |
| | | AAWLNGGNRWGQGTLVTVSS |
| CD40L-8 | 1195 | EVQLVESGGGLVQPGGSLRLSCAASGRTFSRSDMGWFRQAPGKEREFV |
| | | AVISWSGAYTEYADSVKGRFTISADNSKNTAYLQMNSLKPEDTAVYYC |
| | | ASDHYDTDTKSDVYNWGQGTLVTVSS |
| CD40L-9 | 1196 | EVQLVESGGGLVQPGGSLRLSCAASGSGLSINAMGWFRQAPGKEREFV |
| | | AVIYSSDGSTLYADSVKGRFTISADNSKNTAYLQMNSLKPEDTAVYYC |
| | | AAEPYGSGSSLISEYDWGQGTLVTVSS |
| CD40L-10 | 1197 | EVQLVESGGGLVQPGGSLRLSCAASGRIFSTYFMGWFRQAPGKEREFV |
| | | AAIYWSNGKTQYADSVKGRFTISADNSKNTAYLQMNSLKPEDTAVYYC |
| | | AAWLNGGNRWGQGTLVTVSS |
| CD40L-11 | 1198 | EVQLVESGGGLVQPGGSLRLSCAASGRTWNDLDMGWFRQAPGKEREFV |
| | | AAISMSGEDAAYADSVKGRFTISADNSKNTAYLQMNSLKPEDTAVYYC |
| | | ASDHYDTDTKSDVYNWGQGTLVTVSS |
| CD40L-12 | 1199 | EVQLVESGGGLVQPGGSLRLSCAASGRSFSTYTMGWFRQAPGKEREFV |
| | | AVIYTSDGANLYADSVKGRFTISADNSKNTAYLQMNSLKPEDTAVYYC |
| | | AAETYGSGSSLMSEYDWGQGTLVTVSS |
| CD40L-13 | 1200 | EVQLVESGGGLVQPGGSLRLSCAASGFTFGNYDMGWFRQAPGKEREFV |
| | | AAIDASGGFTEYADSVKGRFTISADNSKNTAYLQMNSLKPEDTAVYYC |
| | | SADHYDTDTKSDVYNWGQGTLVTVSS |
| CD40L-14 | 1201 | EVQLVESGGGLVQPGGSLRLSCAASGFTFSTYDMGWFRQAPGKEREFV |
| | | AAVSQSGLLTFYADSVKGRFTISADNSKNTAYLQMNSLKPEDTAVYYC |
| | | ASDHYDTDTKSDVYNWGQGTLVTVSS |
| CD40L-15 | 1202 | EVQLVESGGGLVQPGGSLRLSCAASGFTFDDYDMGWFRQAPGKERELV |
| | | ASITSGGSTNYADSVKGRFTISADNSKNTAYLQMNSLKPEDTAVYYCA |
| | | IPHGIDLYTFD-WGQGTLVTVSS |
| CD40L-16 | 1203 | EVQLVESGGGLVQPGGSLRLSCAASGRIFSTYFMGWFRQAPGKEREWI |
| | | STVYSNGHTYYADSVKGRFTISADNSKNTAYLQMNSLKPEDTAVYYCA |
| | | AWLNGGNRWGQGTLVTVSS |
| CD40L-17 | 1204 | EVQLVESGGGLVQPGGSLRLSCAASGRTSNIYAMGWFRQAPGKEREFV |
| | | AVIYSSDGSTLYADSVKGRFTISADNSKNTAYLQMNSLKPEDTAVYYC |
| | | AAEPYGSGSSLMSEYDWGQGTLVTVSS |
| CD40L-18 | 1205 | EVQLVESGGGLVQPGGSLRLSCAASGSISSVNAMGWFRQAPGKEREFI |
| | | AVIYWRDGSSLYADSVKGRFTISADNSKNTAYLQMNSLKPEDTAVYYC |
| | | AAEPYGSGSSLISEYDWGQGTLVTVSS |
| CD40L-19 | 1206 | EVQLVESGGGLVQPGGSLRLSCAASGTITSAVFMGWFRQAPGKEREWV |
| | | ATISSHGLPVYADSVKGRFTISADNSKNTAYLQMNSLKPEDTAVYYCA |
| | | IDEGMDYDGNFYDWGQGTLVTVSS |
| CD40L-20 | 1207 | EVQLVESGGGLVQPGGSLRLSCAASGVITLDSNAMGWFRQAPGKEREF |
| | | VAAITWDGGYTRYADSVKGRFTISADNSKNTAYLQMNSLKPEDTAVYY |
| | | CAAEATFPTWNRGSEADYDWGQGTLVTVSS |
| CD40L-21 | 1208 | EVQLVESGGGLVQPGGSLRLSCAASGRIFSTYFMGWFRQAPGKEREFV |
| | | AASYTGGSGGSTVYADSVKGRFTISADNSKNTAYLQMNSLKPEDTAVY |
| | | YCAAWLNGGNRWGQGTLVTVSS |
| CD40L-22 | 1209 | EVQLVESGGGLVQPGGSLRLSCAASGVTLDDYAMGWFRQAPGKERELV |
| | | AAITNGGITTHYADSVKGRFTISADNSKNTAYLQMNSLKPEDTAVYYC |
| | | AADVGPTVKWGQGTLVTVSS |
| CD40L-23 | 1210 | EVQLVESGGGLVQPGGSLRLSCAASGSIDRINAMGWFRQAPGKEREFV |
| | | AVIYSSDGSTLYADSVKGRFTISADNSKNTAYLQMNSLKPEDTAVYYC |
| | | AAEPYGSGSSLISEYDWGQGTLVTVSS |
| CD40L-24 | 1211 | EVQLVESGGGLVQPGGSLRLSCAASGGAFSVYAMGWFRQAPGKEREFL |
| | | ASISGSGGSTYYADSVKGRFTISADNSKNTAYLQMNSLKPEDTAVYYC |
| | | ARDGGTYGMDVWGQGTLVTVSS |
| CD40L-25 | 1212 | EVQLVESGGGLVQPGGSLRLSCAASGFTFSRYEMGWFRQAPGKEREFV |
| | | AAVTEDGSINYADSVKGRFTISADNSKNTAYLQMNSLKPEDTAVYYCA |
| | | AVYVSTWGNGYDWGQGTLVTVSS |
| CD40L-26 | 1213 | EVQLVESGGGLVQPGGSLRLSCAASGLTFSRYEMGWFRQAPGKEREFV |
| | | AAVTEDGSINYADSVKGRFTISADNSKNTAYLQMNSLKPEDTAVYYCA |
| | | AEIGYYSGGTYFSSEAWGQGTLVTVSS |
| CD40L-27 | 1214 | EVQLVESGGGLVQPGGSLRLSCAASGSISSIHAMGWFRQAPGKEREFI |
| | | AVIYWRDGSSLYADSVKGRFTISADNSKNTAYLQMNSLKPEDTAVYYC |
| | | AAEPYGSGSSLMSEYDWGQGTLVTVSS |
| CD40L-28 | 1215 | EVQLVESGGGLVQPGGSLRLSCAASGVTVDYSGMGWFRQAPGKEREFV |
| | | SAISSYSGNTYYADSVKGRFTISADNSKNTAYLQMNSLKPEDTAVYYC |
| | | AAAYGGGLYRDPRSY-DWGQGTLVTVSS |
| CD40L-29 | 1216 | EVQLVESGGGLVQPGGSLRLSCAASGRTFSSYAMGWFRQAPGKEREFV |
| | | AVIYSSDGSTLYADSVKGRFTISADNSKNTAYLQMNSLKPEDTAVYYC |
| | | AAEHTLGRPSRSQINYLWGQGTLVTVSS |
| CD40L-30 | 1217 | EVQLVESGGGLVQPGGSLRLSCAASGNIFRINAMGWFRQAPGKEREFV |
| | | AVIYSSDGSTLYADSVKGRFTISADNSKNTAYLQMNSLKPEDTAVYYC |
| | | AAEPYGSGSSLISEYDWGQGTLVTVSS |
| CD40L-31 | 1218 | EVQLVESGGGLVQPGGSLRLSCAASGFTFDDSDMGWFRQAPGKEREFV |
| | | AVVNWSGSSESYADSVKGRFTISADNSKNTAYLQMNSLKPEDTAVYYC |
| | | ASDHYDTDTKSDVYNWGQGTLVTVSS |
| CD40L-32 | 1219 | EVQLVESGGGLVQPGGSLRLSCAASGFGFGSYDMGWFRQAPGKEREFV |
| | | AAIYSDGGSAYYADSVKGRFTISADNSKNTAYLQMNSLKPEDTAVYYC |
| | | ASDHYDTDTKSDVYNWGQGTLVTVSS |
| CD40L-33 | 1220 | EVQLVESGGGLVQPGGSLRLSCAASGNIFINNAMGWFRQAPGKEREFV |
| | | ASIEWDGGGAYYADSVKGRFTISADNSKNTAYLQMNSLKPEDTAVYYC |
| | | ARDGGTYGMDVWGQGTLVTVSS |
| CD40L-34 | 1221 | EVQLVESGGGLVQPGGSLRLSCAASGRTISNAAMGWFRQAPGKEREFV |
| | | AAISFRGDSAIYADSVKGRFTISADNSKNTAYLQMNSLKPEDTAVYYC |
| | | ARDAAGDYYYNLDVWGQGTLVTVSS |
| CD40L-35 | 1222 | EVQLVESGGGLVQPGGSLRLSCAASGLTFSSYWMGWFRQAPGKERELV |
| | | ASITDGGSTNYADSVKGRFTISADNSKNTAYLQMNSLKPEDTAVYYCA |
| | | VQVNGIWAWGQGTLVTVSS |
| CD40L-36 | 1223 | EVQLVESGGGLVQPGGSLRLSCAASGFSLDDYAMGWFRQAPGKEREFV |
| | | ASVNWSGKDTYYADSVKGRFTISADNSKNTAYLQMNSLKPEDTAVYYC |
| | | ARDGGTYGMDVWGQGTLVTVSS |
| CD40L-37 | 1224 | EVQLVESGGGLVQPGGSLRLSCAASGRTFSSYYMGWFRQAPGKEREEV |
| | | ATFYTGDGRTYYADSVKGRFTISADNSKNTAYLQMNSLKPEDTAVYYC |
| | | AAWLNGGNRWGQGTLVTVSS |
| CD40L-38 | 1225 | EVQLVESGGGLVQPGGSLRLSCAASGVTFSSYDMGWFRQAPGKEREFV |
| | | AAINWSGGSRSYADSVKGRFTISADNSKNTAYLQMNSLKPEDTAVYYC |
| | | AIPRFRPYEYDWGQGTLVTVSS |
| CD40L-39 | 1226 | EVQLVESGGGLVQPGGSLRLSCAASGGTLDDYVMGWFRQAPGKEREFV |
| | | ASIGRSGNSAVNTDYADSVKGRFTISADNSKNTAYLQMNSLKPEDTAV |
| | | YYCAREPYSGTYYPRYWGQGTLVTVSS |
| CD40L-40 | 1227 | EVQLVESGGGLVQPGGSLRLSCAASGFTFDDYDMGWFRQAPGKERELV |
| | | AAISATGDDTYYADSVKGRFTISADNSKNTAYLQMNSLKPEDTAVYYC |
| | | ASDHYDTDTKSDVYNWGQGTLVTVSS |
| CD40L-41 | 1228 | EVQLVESGGGLVQPGGSLRLSCAASGSTFSKHHAMGWFRQAPGKEREL |
| | | VASISSDNYTVYADSVKGRFTISADNSKNTAYLQMNSLKPEDTAVYYC |
| | | AREAANYREPPLWGQGTLVTVSS |
| CD40L-42 | 1229 | EVQLVESGGGLVQPGGSLRLSCAASGSMSSINAMGWFRQAPGKEREFV |
| | | AVIYSSDGSTLYADSVKGRFTISADNSKNTAYLQMNSLKPEDTAVYYC |
| | | AAEPYGSGSSLISEYDWGQGTLVTVSS |
| CD40L-43 | 1230 | EVQLVESGGGLVQPGGSLRLSCAASGFSLDDYDMGWFRQAPGKEREFV |
| | | AVISWSGAYTEYADSVKGRFTISADNSKNTAYLQMNSLKPEDTAVYYC |
| | | ASDHYDTDTKSDVYNWGQGTLVTVSS |
| CD40L-44 | 1231 | EVQLVESGGGLVQPGGSLRLSCAASGD---YYAMGWFRQAPGKEREFV |
| | | AVIYSSDGSTLYADSVKGRFTISADNSKNTAYLQMNSLKPEDTAVYYC |
| | | AAETYGSGSSLMSEYDWGQGTLVTVSS |
| CD40L-45 | 1232 | EVQLVESGGGLVQPGGSLRLSCAASGLNLSRLDMGWFRQAPGKEREFV |
| | | AASSWTGANTYYADSVKGRFTISADNSKNTAYLQMNSLKPEDTAVYYC |
| | | ASDHYDTDIKSDVYNWGQGTLVTVSS |
| CD40L-46 | 1233 | EVQLVESGGGLVQPGGSLRLSCAASGFTFSRYEMGWFRQAPGKEREWV |
| | | ASLYLNGDYPYYADSVKGRFTISADNSKNTAYLQMNSLKPEDTAVYYC |
| | | AIPHGIAGRITWGQGTLVTVSS |
| CD40L-47 | 1234 | EVQLVESGGGLVQPGGSLRLSCAASGRTLVNYDMGWFRQAPGKEREFV |
| | | AAISMSGEDTIYADSVKGRFTISADNSKNTAYLQMNSLKPEDTAVYYC |
| | | TTGGGTRDYWGQGTLVTVSS |
| CD40L-48 | 1235 | EVQLVESGGGLVQPGGSLRLSCAASGFTFSRYEMGWFRQAPGKEREFV |
| | | AAVTEGGTTSYADSVKGRFTISADNSKNTAYLQMNSLKPEDTAVYYCA |
| | | AESLGRWWGQGTLVTVSS |
| CD40L-49 | 1236 | EVQLVESGGGLVQPGGSLRLSCAASGRTFSRYYMGWFRQAPGKEREFV |
| | | AAIYWSNGKTQYADSVKGRFTISADNSKNTAYLQMNSLKPEDTAVYYC |
| | | AAWLNGGNRWGQGTLVTVSS |
| CD40L-50 | 1237 | EVQLVESGGGLVQPGGSLRLSCAASGFTFDDSDMGWFRQAPGKEREFV |
| | | AAISMSGEDAAYADSVKGRFTISADNSKNTAYLQMNSLKPEDTAVYYC |
| | | ASDHYDTDTKSDVYNWGQGTLVTVSS |
| CD40L-51 | 1238 | EVQLVESGGGLVQPGGSLRLSCAASGYFASWYYMGWFRQAPGKEREEV |
| | | ATFYTGDGRTYYADSVKGRFTISADNSKNTAYLQMNSLKPEDTAVYYC |
| | | AAWLNGGNRWGQGTLVTVSS |
| CD40L-52 | 1239 | EVQLVESGGGLVQPGGSLRLSCAASGRIFSTYFMGWFRQAPGKEREWV |
| | | STIYSNGTPAYADSVKGRFTISADNSKNTAYLQMNSLKPEDTAVYYCA |
| | | AWLNGGNRWGQGTLVTVSS |
| CD40L-53 | 1240 | EVQLVESGGGLVQPGGSLRLSCAASGGRTFSDYDMGWFRQAPGKEREF |
| | | VAAIDASGGFTEYADSVKGRFTISADNSKNTAYLQMNSLKPEDTAVYY |
| | | CASDHYDTDTKSDVYNWGQGTLVTVSS |
| CD40L-54 | 1241 | EVQLVESGGGLVQPGGSLRLSCAASGFTFDDYDMGWFRQAPGKEREFV |
| | | AAIAWTGTNSYYADSVKGRFTISADNSKNTAYLQMNSLKPEDTAVYYC |
| | | ASDHYDTDTKSDVYNWGQGTLVTVSS |
| CD40L-55 | 1242 | EVQLVESGGGLVQPGGSLRLSCAASGLPFSTLHMGWFRQAPGKEREFV |
| | | AAISRSGNLKAYADSVKGRFTISADNSKNTAYLQMNSLKPEDTAVYYC |
| | | AADDYLGGDNWYLGPYDWGQGTLVTVSS |
| CD40L-56 | 1243 | EVQLVESGGGLVQPGGSLRLSCAASGFTLDHYDMGWFRQAPGKEREFV |
| | | AVINWSGAYTEYADSVKGRFTISADNSKNTAYLQMNSLKPEDTAVYYC |
| | | ASDHYDTDTKSDVYNWGQGTLVTVSS |
| CD40L-57 | 1244 | EVQLVESGGGLVQPGGSLRLSCAASGFTFSRYEMGWFRQAPGKEREFV |
| | | ATITEGGARNYADSVKGRFTISADNSKNTAYLQMNSLKPEDTAVYYCA |
| | | AVYVSTWGNGYDWGQGTLVTVSS |
| CD40L-58 | 1245 | EVQLVESGGGLVQPGGSLRLSCAASGRILNTYFMGWFRQAPGKERELV |
| | | AAIYWSNGKTQYADSGKGRFTINADNSKNTAYLQMNSLKPEDTAVYYC |
| | | AAWLNGGNRWGQGTLVTVSS |
| CD40L-59 | 1246 | EVQLVESGGGLVQPGGSLRLSCAASGFTLDYYAMGWFRQAPGKERELV |
| | | ASISNGGLSTYYADSVKGRFTISADNSKNTAYLQMNSLKPEDTAVYYC |
| | | AADVGPTVKWGQGTLVTVSS |
| CD40L-60 | 1247 | EVQLVESGGGLVQPGGSLRLSCAASGLNLSRLDMGWFRQAPGKEREFV |
| | | AAVDNDDNTEYADSVKGRFTISADNSKNTAYLQMNSLKPEDTAVYYCA |
| | | SDHYDTDTKSDVYNWGQGTLVTVSS |
| CD40L-61 | 1248 | EVQLVESGGGLVQPGGSLRLSCAASGFTFSRYEMGWFRQAPGKEREFV |
| | | AAVTEDGSIYADSVKGRFTISADNSKNTAYLQMNSLKPEDTAVYYCAA |
| | | VYVSTWGNGYDWGQGTLVTVSS |
| CD40L-62 | 1249 | EVQLVESGGGLVQPGGSLRLSCAASGVTVDYSGMGWFRQAPGKEREFV |
| | | SAISSYSGNTYYADSVKGRFTISADNSKNTAYLQMNSLKPEDTAVYYC |
| | | AAAYGGGLYRDPRSYDWGQGTLVTVSS |
| CD40L-63 | 1250 | EVQLVESGGGLVQPGGSLRLSCAASGFTLSSNWMGWFRQAPGKEREFV |
| | | AQINWLSESTYYADSVKGRFTISADNSKNTAYLQMNSLKPEDTAVYYC |
| | | AAGDYTDSMWGQGTLVTVSS |
| CD40L-64 | 1251 | EVQLVESGGGLVQPGGSLRLSCAASGFTFSRYEMGWFRQAPGKEREMV |
| | | AAIDDGGNTEYADSVKGRFTISADNSKNTAYLQMNSLKPEDTAVYYCA |
| | | SDHYDTDTKSDVYNWGQGTLVTVSS |
| CD40L-65 | 1252 | EVQLVESGGGLVQPGGSLRLSCAASGFTYGNYDMGWFRQAPGKEREFV |
| | | AVISWSGAYTEYADSVKGRFTISADNSKNTAYLQMNSLKPEDTAVYYC |
| | | ASDHYDTDTKSDVYNWGQGTLVTVSS |
| CD40L-66 | 1253 | EVQLVESGGGLVQPGGSLRLSCAASGGTLDDYVMGWFRQAPGKEREFV |
| | | AAVSYSGSYYADSVKGRFTISADNSKNTAYLQMNSLKPEDTAVYYCAA |
| | | AYGGGLYRDPRSYDWGQGSLVTVSS |
| CD40L-67 | 1254 | EVQLVESGGGLVQPGGSLRLSCAASGRTFSGYAMGWFRQAPGKEREWV |
| | | AAIRWSGGSTYYADSVKGRFTISADNSKNTAYLQMNSLKPEDTAVYYC |
| | | AHSLRHEGDNWFDPWGQGTLVTVSS |
| CD40L-68 | 1255 | EVQLVESGGGLVQPGGSLRLSCAASGFTLDYYDMGWFRQAPGKEREFV |
| | | GSITWRGLTEYADSVKGRFTISADNSKNTAYLQMNSLKPEDTAVYYCA |
| | | TPYYYYMDVWGQGTLVTVSS |
| CD40L-69 | 1256 | EVQLVESGGGLVQPGGSLRLSCAASGRTLSNYDMGWFRQAPGKEREFV |
| | | AAVNWSGRRELYADSVKGRFTISADNSKNTAYLQMNSLKPEDTAVYYC |
| | | ASDHYDTDTKSDVYNWGQGTLVTVSS |
| CD40L-70 | 1257 | EVQLVESGGGLVQPGGSLRLSCAASGNIFGVNPMGWFRQAPGKEREFV |
| | | ASIRGDGRTYADSVKGRFTISADNSKNTAYLQMNSLKPEDTAVYYCAT |
| | | DLRYGFYWGQGTLVTVSS |
| CD40L-71 | 1258 | EVQLVESGGGLVQPGGSLRLSCAASGSIDNIHAMGWFRQAPGKERKFV |
| | | AVIYSSDGSTLYADSVKGRFTISADNSKNTAYLQMNSLKPEDTAVYYC |
| | | AAEPYGSGSSLMSEYDWGQGTLVTVSS |
| CD40L-72 | 1259 | EVQLVESGGGLVQPGGSLRLSCAASGFTRDYYTMGWFRQAPGKEREWV |
| | | ALIVGEAITRYADSVKGRFTISADNSKNTAYLQMNSLKPEDTAVYYCA |
| | | ADGVPEYSDYASGPVWGQGTLVTVSS |
| CD40L-73 | 1260 | EVQLVESGGGLVQPGGSLRLSCAASGFTLGNYAMGWFRQAPGKEREFV |
| | | ASITSYGDTYYADSVKGRFTISADNSKNTAYLQMNSLKPEDTAVYYCA |
| | | RDGYTYGVDYWGQGTLVTVSS |
| CD40L-74 | 1261 | EVQLVESGGGLVQPGGSLRLSCAASGRTFSSYYMGWFRQAPGKERELV |
| | | AVIYTSDGSTYYADSVKGRFTISADNSKNTAYLQMNSLKPEDTAVYYC |
| | | AAWLNGGNRWGQGTLVTVSS |
| CD40L-75 | 1262 | EVQLVESGGGLVQPGGSLRLSCAASGRTFSNFAMGWFRQAPGKEREEV |
| | | ASITWIGGGTYYADSVKGRFTISADNSKNTAYLQMNSLKPEDTAVYYC |
| | | ARQDDFWSGYYLPILWGQGTLVTVSS |
| CD40L-76 | 1263 | EVQLVESGGGLVQPGGSLRLSCAASGRTFSTSAMGWFRQAPGKEREWV |
| | | ATIYSRSGGGTAYADSVKGRFTISADNSKNTAYLQMNSLKPEDTAVYY |
| | | CAKEGYDWGDYVMDYWGQGTLVTVSS |
| CD40L-77 | 1264 | EVQLVESGGGLVQPGGSLRLSCAASGFNLDDYAMGWFRQAPGKEREWV |
| | | AGISNGGISTYYADSVKGRFTISADNSKNTAYLQMNSLKPEDTAVYYC |
| | | AAEHTLGRPSRSQINYLWGQGTLVTVSS |
| CD40L-78 | 1265 | EVQLVESGGGLVQPGGSLRLSCAASGGTFSVFAMGWFRQAPGKEREFV |
| | | AVIYSSDGSTLYADSVKGRFTISADNSKNTAYLQMNSLKPEDTAVYYC |
| | | AAEPYGSGSSLISEYDWGQGTLVTVSS |
| CD40L-79 | 1266 | EVQLVESGGGLVQPGGSLRLSCAASGSIYSLDAMGWFRQAPGKEREFV |
| | | ASISGSGGGTAYADSVKGRFTISADNSKNTAYLQMNSLKPEDTAVYYC |
| | | ARDPYTWSHPVVWGQGTLVTVSS |
| CD40L-80 | 1267 | EVQLVESGGGLVQPGGSLRLSCAASGFTFDDYDMGWFRQAPGKERELV |
| | | ASITSGGSTNYADSVKGRFTISADNSKNTAYLQMNSLKPEDTAVYYCA |
| | | IPHGIDLYTFDWGQGTLVTVSS |
| CD40L-81 | 1268 | EVQLVESGGGLVQPGGSLRLSCAASGGIFGINAMGWFRQAPGKEREFI |
| | | AVIYWRDGSSLYADSVKGRFTISADNSKNTAYLQMNSLKPEDTAVYYC |
| | | AAEPYGSGSSLISEYDWGQGTLVTVSS |
| CD40L-82 | 1269 | EVQLVESGGGLVQPGGSLRLSCAASGRIFSTYFMGWFRQAPGKEREGV |
| | | ATIYTGNGYTLYADSVKGRFTISADNSKNTAYLQMNSLKPEDTAVYYC |
| | | AAWLNGGNRWGQGTLVTVSS |
| CD40L-83 | 1270 | EVQLVESGGGLVQPGGSLRLSCAASGRTSNIYAMGWFRQAPGKEREFI |
| | | AVIYWRDGSSLYADSVKGRFTISADNSKNTAYLQMNSLKPEDTAVYYC |
| | | AAEPYGSGSSLISEYDWGQGTLVTVSS |
| CD40L-84 | 1271 | EVQLVESGGGLVQPGGSLRLSCAASGRISNINIMGWFRQAPGKEREFV |
| | | AGISQSGGSTAYADSVKGRFTISADNSKNTAYLQMNSLKPEDTAVYYC |
| | | SRDEKLGPYYFDYWGQGTLVTVSS |
| CD40L-85 | 1272 | EVQLVESGGGLVQPGGSLRLSCAASGLNLSRLDMGWFRQAPGKEREFV |
| | | AAVSGSGDDTYYADSVKGRFTISADNSKNTAYLQMNSLKPEDTAVYYC |
| | | ASDHYDTDTKSDVYNWGQGTLVTVSS |
| CD40L-86 | 1273 | EVQLVESGGGLVQPGGSLRLSCAASGRTLTNYDMGWFRQAPGKEREFV |
| | | AVINSGGGSTQYADSVKGRFTISADNSKNTAYLQMNSLKPEDTAVYYC |
| | | ASDHYDTDTKSDVYNWGQGTLVTVSS |
| CD40L-87 | 1274 | EVQLVESGGGLVQPGGSLRLSCAASGFTFDDYDMGWFRQAPGKEREFV |
| | | AAISMSGDDAAYADSVKGRFTISADNSKNTAYLQMNSLKPEDTAVYYC |
| | | ASDHYDTDTKSDVYNWGQGTLVTVSS |
| CD40L-88 | 1275 | EVQLVESGGGLVQPGGSLRLSCAASGFTFDDYDMGWFRQAPGKEREFV |
| | | AAIDWSGGSTYYADSVKGRFTISADNSKNTAYLQMNSLKPEDTAVYYC |
| | | ASDHYDTDTKSDVYNWGQGTLVTVSS |
| CD40L-89 | 1276 | EVQLVESGGGLVQPGGSLRLSCAASGRIFSTYFMGWFRQAPGKEREFV |
| | | AAIYWSNGKTQYADSVKGRFTISADNSKNTAYLQMNSLKPEDTAVYYC |
| | | ASDHYDTDTKSDVYNWGQGTLVTVSS |
| CD40L-90 | 1277 | EVQLVESGGGLVQPGGSLRLSCAASGFTFSRYEMGWFRQAPGKEREFV |
| | | AAVTEDGSIYADSVKGRFTISADNSKNTAYLQMNSLKPEDTAVYYCAA |
| | | WLNGGNRWGQGTLVTVSS |
| CD40L-91 | 1278 | EVQLVESGGGLVQPGGSLRLSCAASGGTFSSFPMGWFRQAPGKEREFV |
| | | AAISWSEDNTYYADSVKGRFTISADNSKNTAYLQMNSLKPEDTAVYYC |
| | | ASRLAFCGRDCYLPTDWGQGTLVTVSS |
| CD40L-92 | 1279 | EVQLVESGGGLVQPGGSLRLSCAASGFTFDDSDMGWFRQAPGKEREFV |
| | | AAIDASGGFTEYADSVKGRFTISADNSKNTAYLQMNSLKPEDTAVYYC |
| | | ASDHYDTDTKSDVYNWGQGTLVTVSS |
| CD40L-93 | 1280 | EVQLVESGGGLVQPGGSLRLSCAASGRIFSTYFMGWFRQAPGKEREWV |
| | | SSIYSDGSTTDYADSVKGRFTISADNSKNTAYLQMNSLKPEDTAVYYC |
| | | ASDHYDTDTKSDVYNWGQGTLVTVSS |
| CD40L-94 | 1281 | EVQLVESGGGLVQPGGSLRLSCAASGFTFDRSWMGWFRQAPGKEREFV |
| | | GAINWLSESTYYADSVKGRFTISADNSKNTAYLQMNSLKPEDTAVYYC |
| | | AAAYGGGLYRDPRSYDWGQGTLVTVSS |
| CD40L-95 | 1282 | EVQLVESGGGLVQPGGSLRLSCAASGRIFSTYFMGWFRQAPGKEREWV |
| | | SSIYSDGSTTDYADSVKGRFTISADNSKNTAYLQMNSLKPEDTAVYYC |
| | | AAEPYGSGSSLISEYDWGQGTLVTVSS |
| CD40L-96 | 1283 | EVQLVESGGGLVQPGGSLRLSCAASGGTFSAFPMGWFRQAPGKEREWV |
| | | AAITSSGDSIYYADSVKGRFTISADNSKNTAYLQMNSLKPEDTAVYYC |
| | | TSRLAFCGRDCYLPTTWGQGTLVTVSS |
| CD40L-97 | 1284 | EVQLVESGGGLVQPGGSLRLSCAASGGTFGHYAMGWFRQAPGKEREFV |
| | | AVIYSSDGSTLYADSVKGRFTISADNSKNTAYLQMNSLKPEDTAVYYC |
| | | AAEPYGSGSSLISEYDWGQGTLVTVSS |
| CD40L-98 | 1285 | EVQLVESGGGLVQPGGSLRLSCAASGITFKRYDMGWFRQAPGKEREVV |
| | | AVIYTSDGSTYYADSVKGRFTISADNSKNTAYLQMNSLKPEDTAVYYC |
| | | AADRDRYRDGMGPMTTTDFRWGQGTLVTVSS |
| CD40L-99 | 1286 | EVQLVESGGGLVQPGGSLRLSCAASGFTPDDYAMGWFRQAPGKEREFV |
| | | ADIMPYGSTEYADSVKGRFTISADNSKNTAYLQMNSLKPEDTAVYYCA |
| | | RRDAGIDFYYMDVWGQGTLVTVSS |
| CD40L- | 1287 | EVQLVESGGGLVQPGGSLRLSCAASGFTFDDYNMGWFRQAPGKEREWV |
| 100 | | SSISSTYGLTYYADSVKGRFTISADNSKNTAYLQMNSLKPEDTAVYYC |
| | | TRLIDDFVTGYDYWGQGTLVTVSS |
| CD40L- | 1288 | EVQLVESGGGLVQPGGSLRLSCAASGGTFESDTMGWFRQAPGKEREWI |
| 101 | | SSIYSNGHTYADSVKGRFTISADNSKNTAYLQMNSLKPEDTAVYYCAR |
| | | GGGSTIIFDIWGQGTLVTVSS |
| CD40L- | 1289 | EVQLVESGGGLVQPGGSLRLSCAASGLTFSRYEMGWFRQAPGKEREFV |
| 102 | | AAVTEDGSIYADSVKGRFTISADNSKNTAYLQMNSLKPEDTAVYYCAA |
| | | EIGYYSGGTYFSSEAWGQGTLVTVSS |
| CD40L- | 1290 | EVQLVESGGGLVQPGGSLRLSCAASGRSFSSVYAMGWFRQAPGKEREF |
| 103 | | IAVIYWRDGSSLYADSVKGRFTISADNSKNTAYLQMNSLKPEDTAVYY |
| | | CAAEPYGSGSSLISEYDWGQGTLVTVSS |
| CD40L- | 1291 | EVQLVESGGGLVQPGGSLRLSCAASGFPFGMYGMGWFRQAPGKEREWV |
| 104 | | ATSSNTGGTTYADSVKGRFTISADNSKNTAYLQMNSLKPEDTAVYYCA |
| | | GGIDLYTFHWGQGTLVTVSS |
| CD40L- | 1292 | EVQLVESGGGLVQPGGSLRLSCAASGITFSSRTMGWFRQAPGKEREFV |
| 105 | | AAIRSSGGLFYADSVKGRFTISADNSKNTAYLQMNSLKPEDTAVYYCA |
| | | AQDRRHGDYYTFDYHWGQGTLVTVSS |
| CD40L- | 1293 | EVQLVESGGGLVQPGGSLRLSCAASGLTFNDYAMGWFRQAPGKEREFV |
| 106 | | AGITNGGGRTSYADSVKGRFTISADNSKNTAYLQMNSLKPEDTAVYYC |
| | | AADVGPTVKWGQGTLVTVSS |
| CD40L- | 1294 | EVQLVESGGGLVQPGGSLRLSCAASGFSFDDYAMGWFRQAPGKEREFV |
| 107 | | AAISGWSGGTYYADSVKGRFTISADNSKNTAYLQMNSLKPEDTAVYYC |
| | | ASDGPDAYNWGQGTLVTVSS |
| CD40L- | 1295 | EVQLVESGGGLVQPGGSLRLSCAASGFTFGSNGMGWFRQAPGKEREEV |
| 108 | | AAIDSDGSTNYADSVKGRFTISADNSKNTAYLQMNSLKPEDTAVYYCA |
| | | ADPYYSGSYYYTDPDRYDWGQGTLVTVSS |
| CD40L- | 1296 | EVQLVESGGGLVQPGGSLRLSCAASGSILSINAMGWFRQAPGKEREFV |
| 109 | | AVIYSSDGSTLYADSVKGRFTISADNSKNTAYLQMNSLKPEDTAVYYC |
| | | AAEPYGSGSSLMSEYDWGQGTLVTVSS |
| CD40L- | 1297 | EVQLVESGGGLVQPGGSLRLSCAASGSSGVINAMGWFRQAPGKEREFI |
| 110 | | AVIYWRDGSSLYADSVKGRFTISADNSKNTAYLQMNSLKPEDTAVYYC |
| | | AAEPYGSGSSLISEYDWGQGTLVTVSS |
| CD40L- | 1298 | EVQLVESGGGLVQPGGSLRLSCAASGDTSEINDMGWFRQAPGKEREFV |
| 111 | | AAIYPSGRNAYYADSVKGRFTISADNSKNTAYLQMNSLKPEDTAVYYC |
| | | AIPHGIAGRITWGQGTLVTVSS |
| CD40L- | 1299 | EVQLVESGGGLVQPGGSLRLSCAASGRAFSSYAMGWFRQAPGKEREWV |
| 112 | | SAISWNGGITYYADSVKGRFTISADNSKNTAYLQMNSLKPEDTAVYYC |
| | | AHSLRHEGDNWFDPWGQGTLVTVSS |
| CD40L- | 1300 | EVQLVESGGGLVQPGGSLRLSCAASGSMSSINAMGWFRQAPGKEREFV |
| 113 | | AVIYSSDGSTLYADSVKGRFTISADNSKNTAYLQMNSLKPEDTAVYYC |
| | | AAWLNGGNRWGQGTLVTVSS |
| CD40L- | 1301 | EVQLVESGGGLVQPGGSLRLSCAASGRTFSPYIMGWFRQAPGKEREFV |
| 114 | | AEIGWRDTTLYADSVKGRFTISADNSKNTAYLQMNSLKPEDTAVYYCA |
| | | ARRGGDYLPTDWGQGTLVTVSS |
| CD40L- | 1302 | EVQLVESGGGLVQPGGSLRLSCAASGRTFSRYEMGWFRQAPGKEREFV |
| 115 | | AAVTEDGSTYYADSVKGRFTISADNSKNTAYLQMNSLKPEDTAVYYCA |
| | | IAHGSSTYNWGQGTLVTVSS |
| CD40L- | 1303 | EVQLVESGGGLVQPGGSLRLSCAASGTVFSINDMGWFRQAPGKEREFV |
| 116 | | AAMFTGTGSTYYADSVKGRFTISADNSKNTAYLQMNSLKPEDTAVYYC |
| | | AEGYCSSTSCYSAFDIWGQGTLVTVSS |
| CD40L- | 1304 | EVQLVESGGGLVQPGGSLRLSCAASGFIGNYHAMGWFRQAPGKEREFI |
| 117 | | AVIYWRDGSSLYADSVKGRFTISADNSKNTAYLQMNSLKPEDTAVYYC |
| | | AAEPYGSGSSLISEYDWGQGTLVTVSS |
| CD40L- | 1305 | EVQLVESGGGLVQPGGSLRLSCAASGVTVDYSGMGWFRQAPGKEREFV |
| 118 | | SAISSYSGNTYYADSVKGRFTISADNSKNTAYLQMNSLKPEDTAVYYC |
| | | AAWLNGGNRWGQGTLVTVSS |
| CD40L- | 1306 | EVQLVESGGGLVQPGGSLRLSCAASGSAFGDSWMGWFRQAPGKEREFV |
| 119 | | ATINWSGNINYADSVKGRFTISADNSKNTAYLQMNSLKPEDTAVYYCA |
| | | RDSGWATVTHNSYYFDYWGQGTLVTVSS |
| CD40L- | 1307 | EVQLVESGGGLVQPGGSLRLSCAASGRIFSTYFMGWFRQAPGKEREFV |
| 120 | | AAIYWSNGKTQYADSVKGRFTISADNSKNTAYLQMNSLKPEDTAVYYC |
| | | AAEPYGSGSSLISEYDWGQGTLVTVSS |
| CD40L- | 1308 | EVQLVESGGGLVQPGGSLRLSCAASGRTFSTYAMGWFRQAPGKEREFV |
| 121 | | AVIYSSDGSTLYADSVKGRFTISADNSKNTAYLQMNSLKPEDTAVYYC |
| | | AAEPYGSGSSLISEYDWGQGTLVTVSS |
| CD40L- | 1309 | EVQLVESGGGLVQPGGSLRLSCAASGLLFSSYDMGWFRQAPGKEREFV |
| 122 | | AAISWSTGSGDDTYYADSVKGRFTISADNSKNTAYLQMNSLKPEDTAV |
| | | YYCASDHYDTDTKSDVYNWGQGTLVTVSS |
| CD40L- | 1310 | EVQLVESGGGLVQPGGSLRLSCAASGRTFSIYAMGWFRQAPGKEREFV |
| 123 | | AVIYSSDGSTLYADSVKGRFTISADNSKNTAYLQMNSLKPEDTAVYYC |
| | | AAEPYGSGSSLMSEYDWGQGTLVTVSS |
| CD40L- | 1311 | EVQLVESGGGLVQPGGSLRLSCAASGFTLDAYAMGWFRQAPGKEREFV |
| 124 | | AEIGWRDTTLYADSVKGRFTISADNSKNTAYLQMNSLKPEDTAVYYCA |
| | | KRLGGNPLPDYWGQGTLVTVSS |
| CD40L- | 1312 | EVQLVESGGGLVQPGGSLRLSCAASGFTFDYYTMGWFRQAPGKEREFV |
| 125 | | AVIYSSDGSTLYADSVKGRFTISADNSKNTAYLQMNSLKPEDTAVYYC |
| | | AIDEGMDYDGNFYDWGQGTLVTVSS |
| CD40L- | 1313 | EVQLVESGGGLVQPGGSLRLSCAASGNIFRINAMGWFRQAPGKEREFV |
| 126 | | AVIYSSDGSTLYADSVKGRFTISADNSKNTAYLQMNSLKPEDTAVYYC |
| | | AAWLNGGNRWGQGTLVTVSS |
| CD40L- | 1314 | EVQLVESGGGLVQPGGSLRLSCAASGFTFSRYEMGWFRQAPGKERELV |
| 127 | | ASITNGGSTYYADSVKGRFTISADNSKNTAYLQMNSLKPEDTAVYYCA |
| | | SDHYDTDTKSDVYNWGQGTLVTVSS |
| CD40L- | 1315 | EVQLVESGGGLVQPGGSLRLSCAASGLTFGTHVMGWFRQAPGKEREFV |
| 128 | | ASIDWSGRSTYYADSVKGRFTISADNSKNTAYLQMNSLKPEDTAVYYC |
| | | AADVWGLGYDWGQGTLVTVSS |
| CD40L- | 1316 | EVQLVESGGGLVQPGGSLRLSCAASGFTFSRYEMGWFRQAPGKEREFV |
| 129 | | AAVTEDGSIYADSVKGRFTISADNSKNTAYLQMNSLKPEDTAVYYCAS |
| | | DHYDTDTKSDVYNWGQGTLVTVSS |
| CD40L- | 1317 | EVQLVESGGGLVQPGGSLRLSCAASGFTFDDYPMGWFRQAPGKEREFV |
| 130 | | AAIGLNTYYADSVKGRFTISADNSKNTAYLQMNSLKPEDTAVYYCAAD |
| | | VWYGSTGWDFAWGQGTLVTVSS |
| CD40L- | 1318 | EVQLVESGGGLVQPGGSLRLSCAASGFTYGNYDMGWFRQAPGKEREFV |
| 131 | | AAIYPSGRNAYYADSVKGRFTISADNSKNTAYLQMNSLKPEDTAVYYC |
| | | ASDHYDTDTKSDVYNWGQGTLVTVSS |
| CD40L- | 1319 | EVQLVESGGGLVQPGGSLRLSCAASGSIDRINAMGWFRQAPGKEREFI |
| 132 | | AVIYWRDGSSLYADSVKGRFTISADNSKNTAYLQMNSLKPEDTAVYYC |
| | | AAEPYGSGSSLISEYDWGQGTLVTVSS |
| CD40L- | 1320 | EVQLVESGGGLVQPGGSLRLNCAASGSIENINAMGWFRQAPGKEREFV |
| 133 | | AVIYSSDGSTLYADSVKGRFTISADNSKNTAYLQMNSLKPEDTAVYYC |
| | | AAETFGSGSSLMSEYDWGQGTLVTVSS |
| CD40L- | 1321 | EVQLVESGGGLVQPGGSLRLSCAASGFTFSRYEMGWFRQAPGKEREFV |
| 134 | | ATITEGGARNYADSVKGRFTISADNSKNTAYLQMNSLKPEDTAVYYCA |
| | | AEIGYYSGGTYFSSEAWGQGTLVTVSS |
| CD40L- | 1322 | EVQLVESGGGLVQPGGSLRLSCAASGRIFSTYFMGWFRQAPGKEREFV |
| 135 | | AVIYSSDGSTLYADSVKGRFTISADNSKNTAYLQMNSLKPEDTAVYYC |
| | | AAEPYGSGSSLISEYDWGQGTLVTVSS |
| CD40L- | 1323 | EVQLVESGGGLVQPGGSLRLSCAASGFTFSDYDMGWFRQAPGKEREFV |
| 136 | | AAISMSGEDAAYADSVKGRFTISADNSKNTAYLQMNSLKPEDTAVYYC |
| | | ASDHYDTDTKSDVYNWGQGTLVTVSS |
| CD40L- | 1324 | EVQLVESGGGLVQPGGSLRLSCAASGFTFSRYEMGWFRQAPGKEREFV |
| 137 | | AAIDDGGNTEYADSVKGRFTISADNSKNTAYLQMNSLKPEDTAVYYCA |
| | | AVYVSTWGNGYDWGQGTLVTVSS |
| CD40L- | 1325 | EVQLVESGGGLVQPGGSLRLSCAASGFTFGNYDMGWFRQAPGKEREFV |
| 138 | | AVIDTNGGLIAYADSVKGRFTISADNSKNTAYLQMNSLKPEDTAVYYC |
| | | ASDHYDTDTKSDVYNWGQGTLVTVSS |
| CD40L- | 1326 | EVQLVESGGGLVQPGGSLRLSCAASGFTFDDRAMGWFRQAPGKEREFV |
| 139 | | AVIYSSDGSTLYADSVKGRFTISADNSKNTAYLQMNSLKPEDTAVYYC |
| | | AKEEWELPFDYWGQGTLVTVSS |
| CD40L- | 1327 | EVQLVESGGGLVQPGGSLRLSCAASGNIFSHNAMGWFRQAPGKEREFV |
| 140 | | ASMRGSGSTVYADSVKGRFTISADNSKNTAYLQMNSLKPEDTAVYYCA |
| | | KSVYGDYIFDYWGQGTLVTVSS |
| CD40L- | 1328 | EVQLVESGGGLVQPGGSLRLSCAASGGTLDDYAMGWFRQAPGKEREFL |
| 141 | | ASVSWGFGSTYYADSVKGRFTISADNSKNTAYLQMNSLKPEDTAVYYC |
| | | AKDGGSYGMDVWGQGTLVTVSS |
| CD40L- | 1329 | EVQLVESGGGLVQPGGSLRLSCAASGITFSSTVMGWFRQAPGKEREFV |
| 142 | | SAISADGSDKRYADSVKGRFTISADNSKNTAYLQMNSLKPEDTAVYYC |
| | | AGQYGTALFFDYWGQGTLVTVSS |
| CD40L- | 1330 | EVQLVESGGGLVQPGGSLRLSCAASGRTFSSYDMGWFRQAPGKEREFV |
| 143 | | AAIDASGGFTEYADSVKGRFTISADNSKNTAYLQMNSLKPEDTAVYYC |
| | | ASDHYDTDTKSDVYNWGQGTLVTVSS |
| CD40L- | 1331 | EVQLVESGGGLVQPGGSLRLSCAASGGTFSVFAMGWFRQAPGKEREFV |
| 144 | | ATIGSGGTTNYADSVKGRFTISADNSKNTAYLQMNSLKPEDTAVYYCA |
| | | RDSGWATVTHNSYYFDYWGQGTLVTVSS |
| CD40L- | 1332 | EVQLVESGGGLVQPGGSLRLSCAASGRIFSTYFMGWFRQAPGKEREWV |
| 145 | | SSIYSDGSTTDYADSVKGRFTISADNSKNTAYLQMNSLKPEDTAVYYC |
| | | AAVYVSTWGNGYDWGQGTLVTVSS |
| CD40L- | 1333 | EVQLVESGGGLVQPGGSLRLSCAASGSIDNIHAMGWFRQAPGKEREFI |
| 146 | | AVIYWRDGSSLYADSVKGRFTISADNSKNTAYLQMNSLKPEDTAVYYC |
| | | AAWLNGGNRWGQGTLVTVSS |
| CD40L- | 1334 | EVQLVESGGGLVQPGGSLRLSCAASGFTFSRYEMGWFRQAPGKEREFV |
| 147 | | ATITEGGARNYADSVKGRFTISADNSKNTAYLQMNSLKPEDTAVYYCA |
| | | SDHYDTDTKSDVYNWGQGTLVTVSS |
| CD40L- | 1335 | EVQLVESGGGLVQPGGSLRLSCAASGFTFGNYDMGWFRQAPGKERELV |
| 148 | | AAISMSGDDAAYADSVKGRFTISADNSKNTAYLQMNSLKPEDTAVYYC |
| | | ASDHYDTDTKSDVYNWGQGTLVTVSS |
| CD40L- | 1336 | EVQLVESGGGLVQPGGSLRLSCAASGSIFSIDVMGWFRQAPGKEREFV |
| 149 | | ASISGSGEDTYYADSVKGRFTISADNSKNTAYLQMNSLKPEDTAVYYC |
| | | AANVKTWAGMTRDWGQGTLVTVSS |
| CD40L- | 1337 | EVQLVESGGGLVQPGGSLRLSCAASGFPLDDYDMGWFRQAPGKEREFV |
| 150 | | AAIDASGGTYADSVKGRFTISADNSKNTAYLQMNSLKPEDTAVYYCAS |
| | | DHYDTDTKSDVYNWGQGTLVTVSS |
| CD40L- | 1338 | EVQLVESGGGLVQPGGSLRLSCAASGFTFADYAMGWFRQAPGKEREFV |
| 151 | | AVINRSGASTVYADSVKGRFTISADNSKNTAYLQMNSLKPEDTAVYYC |
| | | ARLPLGEYQFDYWGQGTLVTVSS |
| CD40L- | 1339 | EVQLVESGGGLVQPGGSLRLSCAASGFTFSTYDMGWFRQAPGKEREFV |
| 152 | | AAVSQSGLLTFYADSVKGRFTISADNSKNTAYLQMNSLKPEDTAVYYC |
| | | AAWLNGGNRWGQGTLVTVSS |
| CD40L- | 1340 | EVQLVESGGGLVQPGGSLRLSCAASGTVFSISDMGWFRQAPGKEREFV |
| 153 | | AAIYPSGRNAYYADSVKGRFTISADNSKNTAYLQMNSLKPEDTAVYYC |
| | | AADGVPEYSDYASGPVWGQGTLVTVSS |
| CD40L- | 1341 | EVQLVESGGGLVQPGGSLRLSCAASGRTSRSYEMGWFRQAPGKEREFV |
| 154 | | AAIDWDGSRTQYADSVKGRFTISADNSKNTAYLQMNSLKPEDTAVYYC |
| | | AVPRETGWDGDWGQGTLVTVSS |
| CD40L- | 1342 | EVQLVESGGGLVQPGGSLRLSCAASGRIFSTYFMGWFRQAPGKEREFV |
| 155 | | AAIYWSNGKTQYADSVKGRFTISADNSKNTAYLQMNSLKPEDTAVYYC |
| | | AAVYVSTWGNGYDWGQGTLVTVSS |
| CD40L- | 1343 | EVQLLESGGGLVQPGGSLRLSCAASGFMFSWYDMGWVRQAPGKGLEWV |
| 156 | | SSIDWHGWVTYYADSVKGRFTISRDNSKNTLYLQMNSLRAEDTAVYYC |
| | | AKAYYGGFDYWGQGTLVTVSS |
| CD40L- | 1344 | EVQLLESGGGLVQPGGSLRLSCAASGFDFSDYEMSWVRQAPGKGLEWV |
| 157 | | SSITSEGGSTYYADSVKGRFTISRDNSKNTLYLQMNSLRAEDTAVYYC |
| | | AKPDVLFDYWGQGTLVTVSS |
| CD40L- | 1345 | EVQLLESGGGLVQPGGSLRLSCAASGGYNFRDYMHWVRQAPGKGLEWV |
| 158 | | SSIGRHGGRTYYADSVKGRFTISRDNSKNTLYLQMNSLRAEDTAVYYC |
| | | AKDLGQGFDYWGQGTLVTVSS |
| CD40L- | 1346 | EVQLLESGGGLVQPGGSLRLSCAASGFDFSDYEMSWVRQAPGKGLEWV |
| 159 | | SSITSEGGSTYYADSVKGRFTISRNNSKNTLYLQMNSLRAEDTAVYYC |
| | | AKPDVLFDYWGQGTLVTVSS |
| CD40L- | 1347 | EVQLLESGGGLVQPGGSLRLSCAASGFDFSDYEMSWVRQAPGKGLEWV |
| 160 | | SSITSEGGSTYYADSVKGRFTISRDNSKNTLYLQMNSLRAEDTAVYYC |
| | | AKPDVLFDYWGQGTLVTVSS |
| CD40L- | 1348 | EVQLLESGGGLVQPGGSLRLSCAASGFDFSDYEMSWVRQAPGKGLEWV |
| 161 | | SSITSEGGSTYYADSVKGRFTISRDNSKNTLYLQMNSLRAEDTAVYYC |
| | | AKPDVLFDYWGQGTLVTVSS |
| CD40L- | 1349 | EVQLLESGGGLVQPGGSLRLSCAASGGYNFRDYMHWVRQAPGKGLEWV |
| 162 | | AEIRNKANNHATKYADSVKGRFTISRDNSKNTLYLQMNSLRAEDTAVY |
| | | YCAKNLGQGFDYWGQGTLVTVSS |
| CD40L- | 1350 | EVQLLESGGGLVQPGGSLRLSCAASGGYNFRDYMHWVRQAPGKGLEWV |
| 163 | | SSINDRGDQTYYADSVEGRFTISRDNSKNTLYLQMNSLRAEDTAVYYC |
| | | AKNLGQGFDYWGQGTLVTVSS |
| CD40L- | 1351 | EVQLLESGGGLVQPGGSLRLSCAASGFDFSDYEMSWVRQAPGKGLEWV |
| 164 | | SSITSEGGSTYYADSVKGRFTISRDNSKNTLYLQMNSLRAEDTAVYYC |
| | | AKPDVLFDYWGQGTLVTVSS |
| CD40L- | 1352 | EVQLLESGGGLVQPGGSLRLSCAASGFDFSDYEMSWVRQAPGKGLEWV |
| 165 | | SSITSEGGSTYYADSVKGRFTISRDNSKNTLYLQMNSLRAEDTAVYYC |
| | | AKPDVLFDYWGQGTLVTVSS |
| CD40L- | 1353 | EVQLLESGGGLVQPGGSLRLSCAASGFDFSDYEMSWVRQAPGKGLEWV |
| 166 | | SSITSEGGSTYYADSVKGRFTISRDNSKNTLYLQMNSLRAEDTAVYYC |
| | | AKPDVLFDYWGQGTLVTVSS |
| CD40L- | 1354 | EVQLLESGGGLVQPGGSLRLSCAASGGYNFRDYMHWVRQAPGKGLEWV |
| 167 | | SSISNSGGSTYYADSVKGRFTISRDNSKNTLYLQMNSLRAEDTAVYYC |
| | | AKNLGQGFDYWGQGTLVTVSS |
| CD40L- | 1355 | EVQLLESGGGLVQPGGSLRLSCAASGFDFSDYEMSWVRQAPGKGLEWV |
| 168 | | SSITSEGGSTYYADSVKGRFTISRDNSKNTLYLQMNSLRAEDTAVYYC |
| | | AKPDVLFDYWGQGTLVTVSS |
| CD40L- | 1356 | EVQLLESGGGLVQPGGSLRLSCAASGFDFSDYEMSWVRQAPGKGLEWV |
| 169 | | SSITSEGGSTYYADSVKGRFTISRDNSKNTLYLQMNSLRAEDTAVYYC |
| | | AKPDVLFDYWGQGTLVTVSS |
| CD40L- | 1357 | EVQLLESGGGLVQPGGSLRLSCAASGGYNFKDYMHWVRQAPGKGLEWV |
| 170 | | SSIGRHGGRTYYADSVKGRFTISRDNSKNTLYLQMNSLRAEDTAVYYC |
| | | AKDLGQGFDYWGQGTLVTVSS |
| CD40L- | 1358 | EVQLLESGGGLVQPGGSLRLSCAASGFDFSDYEMSWVRQAPGKGLEWV |
| 171 | | SSITSEGGSTYYADSVKGRFTISRDNSKNTLYLQMNSLRAEDTAVYYC |
| | | AKPDQFFDYWGQGTLVTVSS |
| CD40L- | 1359 | EVQLLESGGGLVQPGGSLRLSCAASGFDFSDYEMSWVRQAPGKGLEWV |
| 172 | | SSITSEGGSTYYADSVKGRFTISRDNSKNTLYLQMNSLRAEDTAVYYC |
| | | AKPDVLFDYWGQGTLVTVSS |
| CD40L- | 1360 | EVQLLESGGGLVQPGGSLRLSCAASGGYNFRDYMHWVRQAPGKGLEWV |
| 173 | | ATISGGGINTYYPDSVKGRFTISRDNSKNTLYLQMNSLRAEDTAVYYC |
| | | AKDLGQGFDYWGQGTLVTVSS |
| CD40L- | 1361 | EVQLLESGGGLVQPGGSLRLSCAASGFDFSDYEMSWVRQAPGKGLEWV |
| 174 | | SSITSEGGSTYYADSVKGRFTISRDNSKNTLYLQMNSLRAEDTAVYYC |
| | | AKPGRLFDYWGQGTLVTVSS |
| CD40L- | 1362 | EVQLLESGGGLVQPGGSLRLSCAASGFDFSDYEMSWVRQAPGKGLEWV |
| 175 | | SSITSEGGSTYYADSVKGRFTISRDNSKNTLYLQMNSLRAEDTAVYYC |
| | | AKPDKDFDYWGQGTLVTVSS |
| CD40L- | 1363 | EVQLLESGGGLVQPGGSLRLSCAASGFMFSWYDMGWVRQAPGKGLEWV |
| 176 | | SAISGSGGGTSYADSVKGRFTISRDNSKNTLYLQMNSLRAEDTAVYYC |
| | | AKHSKSSHRQSFDYWGQGTLVTVSS |
| CD40L- | 1364 | EVQLLESGGGLVQPGGSLRLSCAASGFTFASYEMTWVRQAPGKGLEWV |
| 177 | | SSITSEGGSTYYADSVKGRFTISRDNSKNTLYLQMNSLRAEDTAVYYC |
| | | AKPDVLFDYWGQGTLVTVSS |
| CD40L- | 1365 | EVQLLESGGGLVQPGGSLRLSCAASGFTFEDYQMGWVRQAPGKGLEWV |
| 178 | | SSITSEGGSTYYADSVKGRFTISRDNSKNTLYLQMNSLRAEDTAVYYC |
| | | AKPGRDFDYWGQGTLVTVSS |
| CD40L- | 1366 | EVQLLESGGGLVQPGGSLRLSCAASGFDFSDYEMSWVRQAPGKGLEWV |
| 179 | | SSITSEGGSTYYADSVKGRFTISRDNSKNTLYLQMNSLRAEDTAVYYC |
| | | AKPDVLFDYWGQGTLVTVSS |
| CD40L- | 1367 | EVQLLESGGGLVQPGGSLRLSCAASGFDFSDYEMSWVRQAPGKGLEWV |
| 180 | | SSITSEGGSTYYADSVKGRFTISRDNSKNTLYLQMNSLRAEDTAVYYC |
| | | AKPDVLFDYWGQGTLVTVSS |
| CD40L- | 1368 | EVQLLESGGGLVQPGGSLRLSCAASGFDFSDYEMSWVRQAPGKGLEWV |
| 181 | | SSITSEGGSTYYADSVKGRFTISRDNSKNTLYLQMNSLRAEDTAVYYC |
| | | AKPGVLFDYWGQGTLVTVSS |
| CD40L- | 1369 | EVQLLESGGGLVQPGGSLRLSCAASGGYNFRDYMHWVRQAPGKGLEWV |
| 182 | | SYISSSGSSTYYADSVKGRFTISRDNSKNTLYLQMNSLRAEDTAVYYC |
| | | AKNLGQGFDYWGQGTLVTVSS |
| CD40L- | 1370 | EVQLLESGGGLVQPGGSLRLSCAASGGYNFRDYMHWVRQAPGKGLEWV |
| 183 | | SSIVSSGGLTLYADSVKGRFTISRDNSKNTLYLQMNSLRAEDTAVYYC |
| | | AKDLGQGFDYWGQGTLVTVSS |
| CD40L- | 1371 | EVQLLESGGGLVQPGGSLRLSCAASGFDFSDYEMSWVRQAPGKGLEWV |
| 184 | | SSITSEGGSTYYADSVKGRFTISRDNSKNTLYLQMNSLRAEDTAVYYC |
| | | AKPGRLFDYWGQGTLVTVSS |
| CD40L- | 1372 | EVQLLESGGGLVQPGGSLRLSCAASGFDFSDYEMSWVRQAPGKGLEWV |
| 185 | | SSITSEGGSTYYADSVKGRFTISRDNSKNTLYLQMNSLRAEDTAVYYC |
| | | AKPDQFLDYWGQGTLVTVSS |
| CD40L- | 1373 | EVQLLESGGGLVQPGGSLRLSCAASGFDFSDYEMSWVRQAPGKGLEWV |
| 186 | | SSITSEGGSTYYADSVKGRFTISRDNSKNTLYLQMNSLRAEDTAVYYC |
| | | AKPDVLFDYWGQGTLVTVSS |
| CD40L- | 1374 | EVQLLESGGGLVQPGGSLRLSCAASGFDFSDYEMSWVRQAPGKGLEWV |
| 187 | | SSITSEGGSTYYADSVKGRFTISRDNSKNTLYLQMNSLRAEDTAVYYC |
| | | AKPGKNFDYWGQGTLVTVSS |
| CD40L- | 1375 | EVQLLESGGGLVQPGGSLRLSCAASGFTFASYEMTWVRQAPGKGLEWV |
| 188 | | SSITSEGGSTYYADSVKGRFTISRDNSKNTLYLQMNSLRAEDTAVYYC |
| | | AKPDQFFDYWGQGTLVTVSS |
| CD40L- | 1376 | EVQLLESGGGLVQPGGSLRLSCAASGFDFSDYEMSWVRQAPGKGLEWV |
| 189 | | SSITSEGGSTYYADSVKGRFTISRDNSKNTLYLQMNSLRAEDTAVYYC |
| | | AKPDKTFDYWGQGTLVTVSS |
| CD40L- | 1377 | EVQLLESGGGLVQPGGSLRLSCAASGFDFSDYEMSWVRQAPGKGLEWV |
| 190 | | SVISSSGGETSYADSVKGRFTISRDNSKNTLYLQMNSLRAEDTAVYYC |
| | | AREYYGYGYALDYWGQGTLVTVSS |
| CD40L- | 1378 | EVQLLESGGGLVQPGGSLRLSCAASGFDFSDYEMSWVRQAPGKGLEWV |
| 191 | | SSITSEGGSTYYADSVKGRFTISRDNSKNTLYLQMNSLRAEDTAVYYC |
| | | AKPDVLFDYWGQGTLVTVSS |
| CD40L- | 1379 | EVQLLESGGGLVQPGGSLRLSCAASGFDFSDYEMSWVRQAPGKGLEWV |
| 192 | | SSITSEGGSTYYADSVKGRFTISRDNSKNTLYLQMNSLRAEDTAVYYC |
| | | AKPDVLFDYWGQGTLVTVSS |
| CD40L- | 1380 | EVQLLESGGGLVQPGGSLRLSCAASGFDFSDYEMSWVRQAPGKGLEWV |
| 193 | | SSITSEGGSTYYADSVKGRFTISRDNSKNTLYLQMNSLRAEDTAVYYC |
| | | AKPDKDFDYWGQGTLVTVSS |
| CD40L- | 1381 | EVQLLESGGGLVQPGGSLRLSCAASGFTFEDTEMDWVRQAPGKGLEWV |
| 194 | | SSITSEGGSTYYADSVKGRFTISRDNSKNTLYLQMNSLRAEDTAVYYC |
| | | AKPDVLFDYWGQGTLVTVSS |
| CD40L- | 1382 | EVQLLESGGGLVQPGGSLRLSCAASGFDFSDYEMSWVRQAPGKGLEWV |
| 195 | | SSITSEGGSTYYADSVKGRFTISRDNSKNTLYLQMNSLRAEDTAVYYC |
| | | AKPGRLFDYWGQGTLVTVSS |
| CD40L- | 1383 | EVQLLESGGGLVQPGGSLRLSCAASGFDFSDYEMSWVRQAPGKGLEWV |
| 196 | | SSITSEGGSTYYADSVKGRFTISRDNSKNTLYLQMNSLRAEDTAVYYC |
| | | AKPDVLFDYWGQGTLVTVSS |
| CD40L | 1384 | EVQLLESGGGLVQPGGSLRLSCAASGFDFSDYEMSWVRQAPGKGLEWV |
| 197 | | SSITSEGGSTYYADSVKGRFTISRDNSKNTLYLQMNSLRAEDTAVYYC |
| | | AKPGRDFDYWGQGTLVTVSS |
| CD40L- | 1385 | EVQLLESGGGLVQPGGSLRLSCAASGFDFSDYEMSWVRQAPGKGLEWV |
| 198 | | SSITSEGGSTYYADSVKGRFTISRDNSKNTLYLQMNSLRAEDTAVYYC |
| | | AKPDVLFDYWGQGTLVTVSS |
| CD40L- | 1386 | EVQLLESGGGLVQPGGSLRLSCAASGFDFSDYEMSWVRQAPGKGLEWV |
| 199 | | SSITSEGGSTYYADSVKGRFTISRDNSKNTLYLQMNSLRSEDTAVYYC |
| | | AKPDVLFDYWGQGTLVTVSS |
| CD40L- | 1387 | EVQLLESGGGLVQPGGSLRLSCAASGFTFASYEMTWVRQAPGKGLEWV |
| 200 | | SSITSEGGSTYYADSVKGRFTISRDNSKNTLYLQMNSLRAEDTAVYYC |
| | | AKPDVLFDYWGQGTLVTVSS |
| CD40L- | 1388 | EVQLLESGGGLVQPGGSLRLSCAASGFTFASYEMTWVRQAPGKGLEWV |
| 201 | | SSITSEGGSTYYADSVKGRFTISRDNSKNTLYLQMNSLRAEDTAVYYC |
| | | AKPDVLFDYWGQGTLVTVSS |
| CD40L- | 1389 | EVQLLESGGGLVQPGGSLRLSCAASGFTFASYEMTWVRQAPGKGLEWV |
| 202 | | SSITSEGGSTYYADSVKGRFTISRDNSKNTLYLQMNSLRAEDTAVYYC |
| | | AKPDVLFDYWGQGTLVTVSS |
| CD40L- | 1390 | EVQLLESGGGLVQPGGSLRLSCAASGGYNFRDYMHWVRQAPGKGLEWV |
| 203 | | AEIRNKANNHATKYADSVKGRFTISRDNSKNTLYLQMNSLRAEDTAVY |
| | | YCAKNLGQGFDYWGQGTLVTVSS |
| CD40L- | 1391 | EVQLLESGGGLVQPGGSLRLSCAASGFDFSDYEMSWVRQAPGKGLEWV |
| 204 | | SSITSEGGSTYYADSVKGRFTISRDNSKNTLYLQMNSLRAEDTAVYYC |
| | | AKPDVLFDYWGQGTLVTVSS |
| CD40L- | 1392 | EVQLLESGGGLVQPGGSLRLSCAASGFDFSDYEMSWVRQAPGKGLEWV |
| 205 | | SSITSEGGSTYYADSVKGRFTISRDNSKNTLYLQMNSLRAEDTAVYYC |
| | | AKPDVLFDYWGQGTLVTVSS |
| CD40L- | 1393 | EVQLLESGGGLVQPGGSLRLSCAASGFDFSDYEMSWVRQAPGKGLEWV |
| 206 | | SSITSEGGSTYYADSVKGRFTISRDNSKNTLYLQMNSLRAEDTAVYYC |
| | | AKPDVLFDYWGQGTLVTVSS |
| CD40L- | 1394 | EVQLLESGGGLVQPGGSLRLSCAASGFTFEDTEMDWVRQAPGKGLEWV |
| 207 | | SSITSEGGSTYYADSVKGRFTISRDNSKNTLYLQMNSLRAEDTAVYYC |
| | | AKPDKDFDYWGQGTLVTVSS |
| CD40L- | 1395 | EVQLLESGGGLVQPGGSLRLSCAASGFTFASYEMTWVRQAPGKGLEWV |
| 208 | | SSITSEGGSTYYADSVKGRFTISRDNSKNTLYLQMNSLRAEDTAVYYC |
| | | AKPDKDFDYWGQGTLVTVSS |
| CD40L- | 1396 | EVQLLESGGGLVQPGGSLRLSCAASGFTFASYEMTWVRQAPGKGLEWV |
| 209 | | SSITSEGGSTYYADSVKGRFTISRDNSKNTLYLQMNSLRAEDTAVYYC |
| | | AKPDVLFDYWGQGTLVTVSS |
| CD40L- | 1397 | EVQLLESGGGLVQPGGSLRLSCAASGGYNFRDYMHWVRQAPGKGLEWV |
| 210 | | ATISGGGINTYYPDSVKGRFTISRDNSKNTLYLQMNSLRAEDTAVYYC |
| | | AKDLGQGFDYWGQGTLVTVSS |
| CD40L- | 1398 | EVQLLESGGGLVQPGGSLRLSCAASGGYNFRDYMHWVRQAPGKGLEWV |
| 211 | | AEIRNKANNHATKYADSVKGRFTISRDNSKNTLYLQMNSLRAEDTAVY |
| | | YCAKNLGQGFDYWGQGTLVTVSS |
| CD40L- | 1399 | EVQLLESGGGLVQPGGSLRLSCAASGFDFSDYEMSWVRQAPGKGLEWV |
| 212 | | SAISGSGGGTSYADSVKGRFTISRDNSKNTLYLQMNSLRAEDTAVYYC |
| | | AKHSKSSHRQSFDYWGQGTLVTVSS |
| CD40L- | 1400 | EVQLLESGGGLVQPGGSLRLSCAASGFDFSDYEMSWVRQAPGKGLEWV |
| 213 | | SSITSEGGSTYYADSVKGRFTISRDNSKNTLYLQMNSLRAEDTAVYYC |
| | | AKPDVLFDYWGQGTLVTVSS |
| CD40L- | 1401 | EVQLLESGGGLVQPGGSLRLSCAASGFTFEDTEMDWVRQAPGKGLEWV |
| 214 | | SSITSEGGSTYYADSVKGRFTISRDNSKNTLYLQMNSLRAEDTAVYYC |
| | | AKPDVLFDYWGQGTLVTVSS |
| CD40L- | 1402 | EVQLLESGGGLVQPGGSLRLSCAASGFTFASYEMTWVRQAPGKGLEWV |
| 215 | | SSITSEGGSTYYADSVKGRFTISRDNSKNTLYLQMNSLRAEDTAVYYC |
| | | AKPDKDFDYWGQGTLVTVSS |
| CD40L- | 1403 | EVQLLESGGGLVQPGGSLRLSCAASGFDFSDYEMSWVRQAPGKGLEWV |
| 216 | | SSITSEGGSTYYADSVKGRFTISRDNSKNTLYLQMNSLRAEDTAVYYC |
| | | AKPDQFFDYWGQGTLVTVSS |
| CD40L- | 1404 | EVQLLESGGGLVQPGGSLRLSCAASGFTFASYEMTWVRQAPGKGLEWV |
| 217 | | SSITSEGGSTYYADSVKGRFTISRDNSKNTLYLQMNSLRAEDTAVYYC |
| | | AKPDKIFDYWGQGTLVTVSS |
| CD40L- | 1405 | EVQLLESGGGLVQPGGSLRLSCAASGFDFSDYEMSWVRQAPGKGLEWV |
| 218 | | SSITSEGGSTYYADSVKGRFTISRDNSKNTLYLQMNSLRAEDTAVYYC |
| | | AKPDVLFDYWGQGTLVTVSS |
| CD40L- | 1406 | EVQLLESGGGLVQPGGSLRLSCAASGFDFSDYEMSWVRQAPGKGLEWV |
| 219 | | SSITSEGGSTYYADSVKGRFTISRDNSKNTLYLQMNSLRAEDTAVYYC |
| | | AKPDQFFDYWGQGTLVTVSS |
| CD40L- | 1407 | EVQLLESGGGLVQPGGSLRLSCAASGGYNFRDYMHWVRQAPGKGLEWV |
| 220 | | SSITSEGGSTYYADSVKGRFTISRDNSKNTLYLQMNSLRAEDTAVYYC |
| | | AKDLGQGFDYWGQGTLVTVSS |
| CD40L- | 1408 | EVQLLESGGGLVQPGGSLRLSCAASGFDFSDYEMSWVRQAPGKGLEWV |
| 221 | | SSITSEGGSAYYADSVKGRFTISRDNSKNTLYLQMNSLRAEDTAVYYC |
| | | AKPGRLFDYWGQGTLVTVSS |
| CD40L- | 1409 | EVQLLESGGGLVQPGGSLRLSCAASGFDFSDYEMSWVRQAPGKGMEWV |
| 222 | | SSITSEGGSTYYADSVKGRFTISRDNSKNTLYLQMNSLRAEDTAVYYC |
| | | AKPDVLFDYWGQGTLVTVSS |
| CD40L- | 1410 | EVQLLESGGGLVQPGGSLRLSCAASGFTFEDYQMGWVRQAPGKGLEWV |
| 223 | | SSITSEGGSTYYADSVKGRFTISRDNSKNTLYLQMNSLRAEDTAVYYC |
| | | AKPDKDFDYWGQGTLVTVSS |
| CD40L- | 1411 | EVQLLESGGGLVQPGGSLILSCAASGFTFASYEMTWVRQAPGKGLEWV |
| 224 | | SSITSEGGSTYYADSVKGRFTISRDNSKNTLYLQMNSLRAEDTAVYYC |
| | | AKPDVLFDYWGQGTLVTVSS |
| CD40L- | 1412 | EVQLLESGGGLVQPGGSLRLSCAASGFTFGTYYMGWVRQAPGKGLEWV |
| 225 | | SSISPSGGWTEYADSVKGRFTISRDNSKNTLYLQMNSLRAEDTAVYYC |
| | | ARGGDYGSGDYWGQGTLVTVSS |
| CD40L- | 1413 | EVQLLESGGGLVQPGGSLRLSCAASGFTFEDTEMDWVRQAPGKGLEWV |
| 226 | | SSITSEGGSTYYADSVKGRFTISRDNSKNTLYLQMNSLRAEDTAVYYC |
| | | AKPDKTFDYWGQGTLVTVSS |
| CD40L- | 1414 | EVQLLESGGGLVQPGGSLRLSCAASGFTFEDYQMGWVRQAPGKGLEWV |
| 227 | | SSITSEGGSTYYADSVKGRFTISRDNSKNTLYLQMNSLRAEDTAVYYC |
| | | AKPDKDFDYWGQGTLVTVSS |
| CD40L- | 1415 | EVQLLESGGGLVQPGGSLRLSCAASGGYNFRDYHWVRQAPGKGLEWVS |
| 228 | | YISSSGSSTYYADSVKGRFTISRDNSKNTLYLQMNSLRAEDTAVYYCA |
| | | KNLGQGFDYWGQGTLVTVSS |
| CD40L- | 1416 | EVQLLESGGGLVQPGGSLRLSCAASGFTFEDTEMDWVRQAPGKGLEWV |
| 229 | | SSITSEGGSTYYADSVKGRFTISRDNSKNTLYLQMNSLRAEDTAVYYC |
| | | AKPGVLFDYWGQGTLVTVSS |
| CD40L- | 1417 | EVQLLESGGGLVQPGGSLRLSCAASGGYNFRDYHWVRQAPGKGLEWVS |
| 230 | | SITSEGGSTYYADSVKGRFTISRDNSKNTLYLQMNSLRAEDTAVYYCA |
| | | KDLGQGFDYWGQGTLVTVSS |
| CD40L- | 1418 | EVQLLESGGGLVQPGGSLRLSCAASGFDFSDYEMSWVRQAPGKGLEWV |
| 231 | | SSITSEGGSTYYADSVKGRFTISRDNSKNTLYLQMNSLRAEDTAVYYC |
| | | AKPDLYFDYWGQGTLVTVSS |
| CD40L- | 1419 | EVQLLESGGGLVQPGGSLRLSCAASGFTFEQTDMHWVRQAPGKGLEWV |
| 232 | | SGIAAYGISTYYADSVKGRFTISRDNSKNTLYLQMNSLRAEDTAVYYC |
| | | ARAGRILFDYWGQGTLVTVSS |
| CD40L- | 1420 | EVQLLESGGGLVQPGGSLRLSCAASGFTFEDYQMGWVRQAPGKGLEWV |
| 233 | | SSITSEGGSTYYADSVKGRFTISRDNSKNTLYLQMNSLRAEDTAVYYC |
| | | AKPDKDFDYWGQGTLVTVSS |
| CD40L- | 1421 | EVQLLESGGGLVQPGGSLRLSCAASGFDFSDYEMSWVRQAPGKGLEWV |
| 234 | | SSITSEGGSTYYADSVKGRFTISRDNSKNTLYLQMNSLRAEDTAVYYC |
| | | AKPGVWFDYWGQGTLVTVSS |
| CD40L- | 1422 | EVQLLESGGGLVQPGGSLRLSCAASGGYNFRDYHWVRQAPGKGLEWVA |
| 235 | | EIRNKANNHATKYADSVKGRFTISRDNSKNTLYLQMNSLRAEDTAVYY |
| | | CAKNLGQGFDYWGQGTLVTVSS |
| CD40L- | 1423 | EVQLLESGGGLVQPGGSLRLSCAASGFDFSDYEMSWVRQAPGKGLEWV |
| 236 | | SSITSEGGSTYYADSVKGRFTISRDNSKNTLYLQMNSLRAEDTAVYYC |
| | | AKPGVWFDYWGQGTLVTVSS |
| CD40L- | 1424 | EVQLLESGGGLVQPGGSLRLSCAASGGYNFRDYHWVRQAPGKGLEWVA |
| 237 | | EIRNKANNHATKYADSVKGRFTISRDNSKNTLYLQMNSLRAEDTAVYY |
| | | CAKNLGQGFDYWGQGTLVTVSS |
| CD40L- | 1425 | EVQLLESGGGLVQPGGSLRLSCAASGGYNFRDYHWVRQAPGKGLEWVA |
| 238 | | TISGGGINTYYPDSVKGRFTISRDNSKNTLYLQMNSLRAEDTAVYYCA |
| | | KDLGQGFDYWGQGTLVTVSS |
| CD40L- | 1426 | EVQLLESGGGLVQPGGSLRLSCAASGFIFQWYDMGWVRQAPGKGLEWV |
| 239 | | SSINDRGDQTYYADSVKGRFTISRDNSKNTLYLQMNSLRAEDTAVYYC |
| | | ARVAFSGSFDYWGQGTLVTVSS |
| CD40L- | 1427 | EVQLLESGGGLVQPGGSLRLSCAASGFDFSDYEMPWVRQAPGKGLEWV |
| 240 | | SSITSEGGSTYYADSVKGRFTISRDNSKNTLYLQMNSLRAEDTAVYYC |
| | | AKPDVLFDYWGQGTLVTVSS |
| CD40L- | 1428 | EVQLLESGGGLVQPGGSLRLSCAASGGYNFRDYMHWVRQAPGKGLEWV |
| 241 | | SSISDHGFNTYYADSVKGRFTISRDNSKNTLYLQMNSLRAEDTAVYYC |
| | | AKNLGQGFDYWGQGTLVTVSS |
| CD40L- | 1429 | EVQLLESGGGLVQPGGSLILSCAASGFTFASYEMTWVRQAPGKGLEWV |
| 242 | | SSITSEGGSTYYADSVKGRFTISRDNSKNTLYLQMNSLRAEDTAVYYC |
| | | AKPDVLFDYWGQGTLVTVSS |
| CD40L- | 1430 | EVQLLESGGGLVQPGGSLRLSCAASGFTFEDYQMGWVRQAPGKGLEWV |
| 243 | | SSITSEGGSTYYADSVKGRFTISRDNSKNTLYLQMNSLRAEDTAVYYC |
| | | AKPDKDFDYWGQGTLVTVSS |
| CD40L- | 1431 | EVQLLESGGGLVQPGGSLRLSCAASGGYNFRDYHWVRQAPGKGLEWVS |
| 244 | | SIWPSGGQTWYADSVKGRFTISRDNSKNTLYLQMNSLRAEDTAVYYCA |
| | | KNLGQGFDYWGQGTLVTVSS |
| CD40L- | 1432 | EVQLLESGGGLVQPGGSLRLSCAASGFDFSDYEMSWVRQAPGKGLEWV |
| 245 | | SSITSEGGSTYYADSVKGRFTISRDNSKNTLYLQMNSLRAEDTAVYYC |
| | | AKNLGQGFDYWGQGTLVTVSS |
| CD40L- | 1433 | EVQLLESGGGLVQPGGSLRLSCAASGFTFKAYEMGWVRQAPGKGLEWV |
| 246 | | SSITSEGGSTYYADSVKGRFTISRDNSKNTLYLQMNSLRAEDTAVYYC |
| | | AKPDVLFDYWGQGTLVTVSS |
| CD40L- | 1434 | EVQLLESGGGLVQPGGSLRLSCAASGFDFSDYEMSWVRQAPGKGLEWV |
| 247 | | SSITSEGGSTYYADSVKGRFTISRDNSKNTLYLQMNSLRAEDTAVYYC |
| | | AKPGVWFDYWGQGTLVTVSS |
| CD40L- | 1435 | EVQLLESGGGLVQPGGSLRLSCAASGFTFASYEMTWVRQAPGKGLEWV |
| 248 | | SSITSEGGSTYYADSVKGRFTISRDNSKNTLYLQMNSLRAEDTAVYYC |
| | | AKPDKTFDYWGQGTLVTVSS |
| CD40L- | 1436 | EVQLLESGGGLVQPGGSLRLSCAASGFTFDNSEMDWVRQAPGKGLEWV |
| 249 | | SSITSEGGSTYYADSVKGRFTISRDNSKNTLYLQMNSLRAEDTAVYYC |
| | | AKPDVLFDYWGQGTLVTVSS |
| CD40L- | 1437 | EVQLLESGGGLVQPGGSLRLSCAASGFIFQWYDMGWVRQAPGKGLEWV |
| 250 | | SSIDWRGLLTYYADSVKGRFTISRDNSKNTLYLQMNSLRAEDTAVYYC |
| | | AKAYYGGFDYWGQGTLVTVSS |
| CD40L- | 1438 | EVQLLESGGGLVQPGGSLRLSCAASGGYNFRDYHWVRQAPGKGLEWVA |
| 251 | | EIRNKANNHATKYADSVKGRFTISRDNSKNTLYLQMNSLRAEDTAVYY |
| | | CAKNLGQGFDYWGQGTLVTVSS |
| CD40L- | 1439 | EVQLLESGGGLVQPGGSLRLSCAASGFTFEDTEMDWVRQAPGKGLEWV |
| 252 | | SSITSEGGSTYYADSVKGRFTISRDNSKNTLYLQMNSLRAEDTAVYYC |
| | | AKPDQFFDYWGQGTLVTVSS |
| CD40L- | 1440 | EVQLLESGGGLVQPGGSLRLSCAASGGYNFRDYHWVRQAPGKGLEWVA |
| 253 | | EIRNKANNHATKYADSVKGRFTISRDNSKNTLYLQMNSLRAEDTAVYY |
| | | CAKNLGQGFDYWGQGTLVTVSS |
| CD40L- | 1441 | EVQLLESGGGLVQPGGSLRLSCAASGFDFSDYEMSWVRQAPGKGLEWV |
| 254 | | SGIADDFTSTYYADSVKGRFTISRDNSKNTLYLQMNSLRAEDTAVYYC |
| | | AKPGKNFDYWGQGTLVTVSS |
| CD40L- | 1442 | EVQLLESGGGLVQPGGSLRLSCAASGFTFEDYQMGWVRQAPGKGLEWV |
| 255 | | SSITSEGGSTYYADSVKGRFTISRDNSKNTLYLQMNSLRAEDTAVYYC |
| | | AKPDKDFDYWGQGTLVTVSS |
| CD40L- | 1443 | EVQLLESGGGLVQPGGSLRLSCAASGFDFSDYEMSWVRQAPGKGLEWV |
| 256 | | SSITSEGGSTYYADSVKGRFTISRDNSKNTLYLQMNSLRAEDTAVYYC |
| | | AKPDRAFDYWGQGTLVTVSS |
| CD40L- | 1444 | EVQLLESGGGLVQPGGSLRLSCAASGFTFSEYGMWWVRQAPGKGLEWV |
| 257 | | SSISGYGSTTYYADSVKGRFTISRDNSKNTLYLQMNSLRAEDTAVYYC |
| | | ARWTSGLDYWGQGTLVTVSS |
| CD40L- | 1445 | EVQLLESGGGLVQPGGSLRLSCAASGGYNFRDYHWVRQAPGKGLEWVA |
| 258 | | EIRNKANNHATKYADSVKGRFTISRDNSKNTLYLQMNSLRAEDTAVYY |
| | | CAKDLGQGFDYWGQGTLVTVSS |
| CD40L- | 1446 | EVQLLESGGGLVQPGGSLRLSCAASGFDFSDYEMSWVRQAPGKGLEWV |
| 259 | | ATISGGGINTYYPDSVKGRFTISRDNSKNTLYLQMNSLRAEDTAVYYC |
| | | AKDLGQGFDYWGQGTLVTVSS |
| CD40L- | 1447 | EVQLLESGGGLVQPGGSLRLSCAASGFTFASYEMTWVRQAPGKGLEWV |
| 260 | | SSITSEGGSTYYADSVKGRFTISRDNSKNTLYLQMNSLRAEDTAVYYC |
| | | AKPDKTFDYWGQGTLVTVSS |
| CD40L- | 1448 | EVQLVESGGGLVQPGGSLRLSCAASGFTFEDTEMDWVRQAPGKGLEWV |
| 261 | | SSITSEGGSTYYADSVKGRFTISRDNSKNTLYLQMNSLRAEDTAVYYC |
| | | AKPDVLFDYWGQGTLVTVSS |
| CD40L- | 1449 | EVQLLESGGGLVQPGGSLRLSCAASGFTFASYEMTWVRQAPGKGLEWV |
| 262 | | SSITSEGGSTYYADSVKGRFTISRDNSKNTLYLQMNSLRAEDTAVYYC |
| | | AKPGRLFDYWGQGTLVTVSS |
| CD40L- | 1450 | EVQLLESGGGLVQPGGSLRLSCAASGFTFDNSEMDWVRQAPGKGLEWV |
| 263 | | SSITSEGGSTYYADSVKGRFTISRDNSKNTLYLQMNSLRAEDTAVYYC |
| | | AKPDVLFDYWGQGTLVTVSS |
| CD40L- | 1451 | EVQLLESGGGLVQPGGSLRLSCAASGGYNFRDYMHWVRQAPGKGLEWV |
| 264 | | SAISGSGGGTSYADSVKGRFTISRDNSKNTLYLQMNSLRAEDTAVYYC |
| | | AKNLGQGFDYWGQGTLVTVSS |
| CD40L- | 1452 | EVQLLESGGGLVQPGGSLRLSCAASGFTFEDTEMDWVRQAPGKGLEWV |
| 265 | | SSITSEGGSTYYADSVKGRFTISRDNSKNTLYLQMNSLRAEDTAVYYC |
| | | AKPGRDFDYWGQGTLVTVSS |
| CD40L- | 1453 | EVQLLESGGGLVQPGGSLRLSCAASGGYNFRDYMHWVRQAPGKGLEWV |
| 266 | | GKINYAGNTDYNDSVKGRFTISRDNSKNTLYLQMNSLRAEDTAVYYCA |
| | | KNLGQGFDYWGQGTLVTVSS |
| CD40L- | 1454 | EVQLLESGGGLVQPGGSLRLSCAASGGYNFRDYHWVRQAPGKGLEWVA |
| 267 | | RLAWNGGSTDYADSVKGRFTISRDNSKNTLYLQMNSLRAEDTAVYYCA |
| | | KDLGQGFDYWGQGTLVTVSS |
| CD40L- | 1455 | EVQLLESGGGLVQPGGSLRLSCAASGGYNFRDYHWVRQAPGKGLEWVS |
| 268 | | SISNSGGSTYYADSVKGRFTISRDNSKNTLYLQMNSLRAEDTAVYYCA |
| | | KNLGQGFDYWGQGTLVTVSS |
| CD40L- | 1456 | EVQLLESGGGLVQPGGSLRLSCAASGFDFSDYEMSWVRQAPGKGLEWV |
| 269 | | SSITSEGGSTYYADSVKGRFTISRDNSKNTLYLQMNSLRAEDTAVYYC |
| | | AKPDRAFDYWGQGTLVTVSS |
| CD40L- | 1457 | EVQLLESGGGLVQPGGSLRLSCAASGFTFNKYPMMWVRQAPGKGLEWV |
| 270 | | ARLAWNGGSTDYADSVKGRFTISRDNSKNTLYLQMNSLRAEDTAVYYC |
| | | AKDLGQGFDYWGQGTLVTVSS |
| CD40L- | 1458 | EVQLLESGGGLVQPGGSLRLSCAASGGYNFRDYMHWVRQAPGKGLEWV |
| 271 | | SSITSEGGSTYYADSVKGRFTISRDNSKNTLYLQMNSLRAEDTAVYYC |
| | | AKPDVLFDYWGQGTLVTVSS |
| CD40L- | 1459 | EVQLLESGGGLVQPGGSLRLSCAASGFDFSDYEMSWVRQATGKGLEWV |
| 272 | | SSITSEGGSTYYADSVKGRFTISRDNSKNTLYLQMNSLRAEDTAVYYC |
| | | AKPGRLFDYWGQGTLVTVSS |
| CD40L- | 1460 | EVQLLESGGGLVQPGGSLRLSCAASGFTFSKYQMTWVRQAPGKGLEWV |
| 273 | | SSITSEGGSTYYADSVKGRFTISRDNSKNTLYLQMNSLRAEDTAVYYC |
| | | AKPDKDFDYWGQGTLVTVSS |
| CD40L- | 1461 | EVQLLESGGGLVQPGGSLRLSCAASGFYFSDYEMSWVRQAPGKGLEWV |
| 274 | | SSITSEGGSTYYADSVKGRFTISRDNSKNTLYLQMNSLRAEDTAVYYC |
| | | AKPGRDFDYWGQGTLVTVSS |
| CD40L- | 1462 | EVQLLESGGGLVQPGGSLRLSCAASGFTFEDYQMGWVRQAPGKGLEWV |
| 275 | | SSISGYGNVIYYADSVKGRFTISRDNSKNTLYLQMNSLRAEDTAVYYC |
| | | ARAGQWLGDFDYWGQGTLVTVSS |
| CD40L- | 1463 | EVQLLESGGGLVQPGGSLRLSCAASGFTFRRYVMGWVRQAPGKGVEWV |
| 276 | | SAISREGRATYYADSVKGRFTISRDNSKNTLYLQMNSLRAEDTAVYYC |
| | | AKDLGQGFDYWGQGTLVTVSS |
| CD40L- | 1464 | EVQLLESGGGLVQPGGSLRLSCAASGGYNFRDYHWVRQAPGKGLEWVA |
| 277 | | EIRNKANNHATKYADSVKGRFTISRDNSKNTLYLQMNSLRAEDTAVYY |
| | | CAKNLGQGFDYWGQGTLVTVSS |
| CD40L- | 1465 | EVQLLESGGGLVQPGGSLRLSCAASGGYNFRDYHWVRQAPGKGLEWVS |
| 278 | | SINDRGDQTYYADSVEGRFTISRDNSKNTLYLQMNSLRAEDTAVYYCA |
| | | KNLGQGFDYWGQGTLVTVSS |
| CD40L- | 1466 | EVQLLESGGGLVQPGGSLRLSCAASGFDFSDYEMSWVRQAPGKGLEWV |
| 279 | | SSITSEGGSTYYADSVKGRFTISRDNSKNTLYLQMNSLRAEDTAVYYC |
| | | AKPGVWFDYWGQGTLVTVSS |
| CD40L- | 1467 | EVQLLESGGGLVQPGGSLRLSCAASGFTFSKYQMTWVRQAPGKGLEWV |
| 280 | | SSITSEGGSTYYADSVKGRFTISRDNSKNTLYLQMNSLRAEDTAVYYC |
| | | AKPDKTFDYWGQGTLVTVSS |
| CD40L- | 1468 | EVQLLESGGGLVQPGGSLRLSCAASGFTFEDYQMGWVRQAPGKGLEWV |
| 281 | | SSITSEGGSTYYADSVKGRFTISRDNSKNTLYLQMNSLRAEDTAVYYC |
| | | AKPDKDFDYWGQGTLVTVSS |
| CD40L- | 1469 | EVQLLESGGGLVQPGGSLRLSCAASGFDFSDYEMSWVRQAPGKGLEWV |
| 282 | | SSITSEGGSTYYADSVKGRFTISRDNSKNTLYLQMNSLRAEDTAVYYC |
| | | AKPGNKFDYWGQGTLVTVSS |
| CD40L- | 1470 | EVQLLESGGGLVQPGGSLRLSCAASGGYNFRDYHWVRQAPGKGLEWVA |
| 283 | | EIRNKANNHATKYADSVKGRFTISRDNSKNTLYLQMNSLRAEDTAVYY |
| | | CAKNLGQGFDYWGQGTLVTVSS |
| CD40L- | 1471 | EVQLLESGGGLVQPGGSLRLSCAASGSTFAGYEVWWVRQAPGKGLEWV |
| 284 | | SGISPSGGITTYADSVKGRFTISRDNSKNTLYLQMNSLRAEDTAVYYC |
| | | AKDLGQGFDYWGQGTLVTVSS |
| CD40L- | 1472 | EVQLLESGGGLVQPGGSLRLSCAASGFDFSDYEMSWVRQAPGKGLEWV |
| 285 | | SSITSEGGSTYYADSVKGRFTISRDNSKNTLYLQMNSLRAEDTAVYYC |
| | | AKPGVWFDYWGQGTLVTVSS |
| CD40L- | 1473 | EVQLLESGGGLVQPGGSLRLSCAASGFTFASYEMTWVRQAPGKGLEWV |
| 286 | | SSITSEGGSTYYADSVKGRFTISRDNSKNTLYLQMNSLRAEDTAVYYC |
| | | AKPGKNFDYWGQGTLVTVSS |
| CD40L- | 1474 | EVQLLESGGGLVQPGGSLRLSCAASGFTFEDTEMDWVRQAPGKGLEWV |
| 287 | | SSITSEGGSTYYADSVKGRFTISRDNSKNTLYLQMNSLRAEDTAVYYC |
| | | AKPDQFFDYWGQGTLVTVSS |
| CD40L- | 1475 | EVQLLESGGGLVQPGGSLRLSCAASGFTFEDYQMGWVRQAPGKGLEWV |
| 288 | | SSITSEGGSTYYADSVKGRFTISRDNSKNTLYLQMNSLRAEDTAVYYC |
| | | AKPDKDFDYWGQGTLVTVSS |
| CD40L- | 1476 | EVQLLESGGGLVQPGGSLRLSCAASGFTFEDTEMDWVRQAPGKGLEWV |
| 289 | | SSITSEGGSTYYADSVKGRFTISRDNSKNTLYLQMNSLRAEDTAVYYC |
| | | AKPGRDFDYWGQGTLVTVSS |
| CD40L- | 1477 | EVQLLESGGGLVQPGGSLRLSCAASGFTFASYEMTWVRQAPGKGLEWV |
| 290 | | SSITSEGGSTYYADSVKGRFTISRDNSKNTLYLQMNSLRAEDTAVYYC |
| | | AKPGRDFDYWGQGTLVTVSS |
| CD40L- | 1478 | EVQLLESGGGLVQPGGSLRLSCAASGFTFKAYEMGWVRQAPGKGLEWV |
| 291 | | SSITSEGGSTYYADSVKGRFTISRDNSKNTLYLQMNSLRAEDTAVYYC |
| | | AKPDKDFDYWGQGTLVTVSS |
| CD40L- | 1479 | EVQLLESGGGLVQPGGSLRLSCAASGFTFKAYEMGWVRQAPGKGLEWV |
| 292 | | SSITSEGGSTYYADSVKGRFTISRDNSKNTLYLQMNSLRAEDTAVYYC |
| | | AKPDKDFDYWGQGTLVTVSS |
| CD40L- | 1480 | EVQLLESGGGLVQPGGSLRLSCAASGFDFSDYEMTWVRQAPGKGLEWV |
| 293 | | SSITSEGGSTYYADSVKGRFTISRDNSKNTLYLQMNSLRAEDTAVYYC |
| | | AKPDKDFDYWGQGTLVTVSS |
| CD40L- | 1481 | EVQLLESGGGLVQPGGSLRLSCAASGGYNFRDYHWVRQAPGKGLEWVA |
| 294 | | EIRNKANNHATKYADSMKGRFTISRDNSKNTLYLQMNSLRAEDTAVYY |
| | | CAKNLGQGFDYWGQGTLVTVSS |
| CD40L- | 1482 | EVQLLESGGGLVQPGGSLRLSCAASGFDFSDYEMSWVRQAPGKGLEWV |
| 295 | | SSITSEGGSTYYADSVKGRFTISRDNSKNTLYLQMNSLRAEDTAVYYC |
| | | AKPGRSFDYWGQGTLVTVSS |
| CD40L- | 1483 | EVQLLESGGGLVQPGGSLRLSCAASGFMFSWYDMGWVRQAPGKGLEWV |
| 296 | | SAISGSGGGTSYADSVKGRFTISRDNSKNTLYLQMNSLRAEDTAVYYC |
| | | AREYYGYGYALDYWGQGTLVTVSS |
| CD40L- | 1484 | EVQLLESGGGLVQPGGSLRLSCAASGFDFSDYEMSWVRQAPGKGLEWV |
| 297 | | SSITSEGGSTYYADSVKGRFTISRDNSKNTLYLQMNSLRAEDTAVYYC |
| | | AKPDVAFDYWGQGTLVTVSS |
| CD40L- | 1485 | EVQLLESGGGLVQPGGSLILSCAASGFTFASYEMTWVRQAPGKGLEWV |
| 298 | | SSITSEGGSTYYADSVKGRFTISRDNSKNTLYLQMNSLRAEDTAVYYC |
| | | AKPDVLFDYWGQGTLVTVSS |
| CD40L- | 1486 | EVQLLESGGGLVQPGGSLRLSCAASGGYNFRDYMHWVRQAPGKGLEWV |
| 299 | | ARLAWNGGSTDYADSVKGRFTISRNNSKNTLYLQMNSLRAEDTAVYYC |
| | | AKPDVLFDYWGQGTLVTVSS |
| CD40L- | 1487 | EVQLLESGGGLVQPGGSLRLSCAASGFDFSDYEMSWVRQAPGKGLEWV |
| 300 | | SSITSEGGSTYYADSVKGRFTISRDNSKNTLYLQMNSLRAEDTAVYYC |
| | | AKPDRRFDYWGQGTLVTVSS |
| CD40L- | 1488 | EVQLLESGGGLVQPGGSLRLSCAASGFDFSDYEMSWVRQAPGKGLEWV |
| 301 | | SGIADDFTSTYYADSVKGRFTISRDNSKNTLYLQMNSLRAEDTAVYYC |
| | | AKPGRDFDYWGQGTLVTVSS |
| CD40L- | 1489 | EVQLLESGGGLVQPGGSLRLSCAASGFTFASYEMTWVRQAPGKGLEWV |
| 302 | | SSITSEGGSTYYADSVKGRFTISRDNSKNTLYLQMNSLRAEDTAVYYC |
| | | AKPGRLFDYWGQGTLVTVSS |
| CD40L- | 1490 | EVQLLESGGGLVQPGGSLRLSCAASGFTFGTYYMGWVRQAPGKGLEWV |
| 303 | | SIISPLGLSTYYADSVKGRFTISRDNSKNTLYLQMNSLRAEDTAVYYC |
| | | ATAEEEPGYDYWGQGTLVTVSS |
| CD40L- | 1491 | EVQLLESGGGLVQPGGSLRLSCAASGFTFYDYQMGWVRQAPGKGLEWV |
| 304 | | SSITSEGGSTYYADSVKGRFTISRDNSKNTLYLQMNSLRAEDTAVYYC |
| | | AKPGKNFDYWGQGTLVTVSS |
| CD40L- | 1492 | EVQLLESGGGLVQPGGSLRLSCAASGFTFGHYEMGWVRQAPGKGLEWV |
| 305 | | SSITSEGGSTYYADSVKGRFTISRDNSKNTLYLQMNSLRAEDTAVYYC |
| | | AKPDVLFDYWGQGTLVTVSS |
| CD40L- | 1493 | EVQLLESGGGLVQPGGSLRLSCAASGFDFSDYEMSWVRQAPGKGLEWV |
| 306 | | SSITSEGGSTYYADSVKGRFTISRDNSKNTLYLQMNSLRAEDTAVYYC |
| | | AKPGRSFDYWGQGTLVTVSS |
| CD40L- | 1494 | EVQLLESGGGLVQPGGSLRLSCAASGFTFEDYQMGWVRQAPGKGLEWV |
| 307 | | SSITGEGGSTYYADSVKGRFTISRDNSKNTLYLQMNSLRAEDTAVYYC |
| | | AKPDVLFDYWGQGTLVTVSS |
| CD40L- | 1495 | EVQLLESGGGLVQPGGSLRLSCAASGFTFEGYPMSWVRQAPGKGLEWV |
| 308 | | SIISPLGLSTYYADSVKGRFTISRDNSKNTLYLQMNSLRAEDTAVYYC |
| | | AKSSDHPQNSFDYWGQGTLVTVSS |
| CD40L- | 1496 | EVQLLESGGGLVQPGGSLRLSCAASGFTFASYEMTWVRQAPGKGLEWV |
| 309 | | SSITSEGGSTYYADSVKGRFTISRDNSKNTLYLQMNSLRAEDTAVYYC |
| | | AKPGRDFDYWGQGTLVTVSS |
| CD40L- | 1497 | EVQLLESGGGLVQPGGSLRLSCAASGFTFEDTEMDWVRQAPGKGLEWV |
| 310 | | SSITSEGGSTYYADSVKGRFTISRDNSKNTLYLQMNSLRAEDTAVYYC |
| | | AKPDRAFDYWGQGTLVTVSS |
| CD40L- | 1498 | EVQLLESGGGLVQPGGSLRLSCAASGGYNFRDYHWVRQAPGKGLEWVA |
| 311 | | EIRNKANNHATKYADSVKGRFTISRDNSKNTLYLQMNSLRAEDTAVYY |
| | | CAKNLGQGFDYWGQGTLVTVSS |
| CD40L- | 1499 | EVQLLESGGGLVQPGGSLRLSCAASGFDFSDYEMSWVRQAPGKGLEWV |
| 312 | | SSITSEGGSTYYADSVKGRFTISRDNSKNTLYLQMNSLRAEDTAVYYC |
| | | AKPGLKFDYWGQGTLVTVSS |
| CD40L- | 1500 | EVQLLESGGGLVQPGGSLRLSCAASGFTFEDYQMGWVRQAPGKGLEWV |
| 313 | | SSITSEGGSTYYADSVKGRFTISRDNSKNTLYLQMNSLRAEDTAVYYC |
| | | AKPDRAFDYWGQGTLVTVSS |
| CD40L- | 1501 | EVQLLESGGGLVQPGGSLRLSCAASGFTFASYEMTWVRQAPGKGLEWV |
| 314 | | SSITSEGGSTYYADSVKGRFTISRDNSKNTLYLQMNSLRAEDTAVYYC |
| | | AKPDVLFDYWGQGTLVTISS |
| CD40L- | 1502 | EVQLLESGGGLVQPGGSLRLSCAASGFTFASYEMTWVRQAPGKGLEWV |
| 315 | | SSITSEGGSTYYADSVKGRFTISRDNSKNTLYLQMNSLRAEDTAVYYC |
| | | AKNLGQGFDYWGQGTLVTVSS |
| CD40L- | 1503 | EVQLLESGGGLVQPGGSLRLSCAASGFTFSNYAMHWVRQAPGKGLEWV |
| 316 | | SALTGSGGSTYYADSVKGRFTISRDNSKNTLYLQMNSLRAEDTAVYYC |
| | | TRGGLQDQIGHFQHWGQGTLVTVSS |
| CD40L- | 1504 | EVQLLESGGGLVQPGGSLRLSCAASGFTFRNYGMSWVRQAPGKGLEWV |
| 317 | | SSISGSGGSTYYVDSVKGRFTIYRDNSKNTLYLQMNSLRAEDTAVYYC |
| | | ARPSGTYYDFQVAYWGQGTLVTVSS |
| CD40L- | 1505 | EVQLLESGGGLVQPGGSLRLSCAASGFTFSTSAMTWVRQAPGKGLEWV |
| 318 | | SAISTGGGSTYYTDSVKGRFTISRDNSKNTLYLQMNSLRAEDTAVYYC |
| | | ARFYGDYEPQNFDHWGQGTLVTVSS |
| CD40L- | 1506 | EVQLLESGGGLVQPGGSLRLSCAASGFTFGHYAMGWVRQAPGKGLEWV |
| 319 | | SAISGSGAGTYYADSVKGRFTISRDNSKNTLYLQMNSLRAEDTAVYYC |
| | | ATHDSPYYYIDVWGQGTLVTVSS |
| CD40L- | 1507 | EVQLLESGGGLVQPGGSLRLSCAASGFTFDNYGMSWVRQAPGKGLEWV |
| 320 | | SAISGSGGSTNYADSVKGRFTISRDNSKNTLYLQMNSLRAEDTAVYYC |
| | | AKDLPAVLPAAMENWGQGTLVTVSS |
| CD40L- | 1508 | EVQLLESGGGLVQPGGSLRLSCAASGFSFRSYAMSWVRQAPGKGLEWV |
| 321 | | SIISGSGGSTSYADSVKGRFTISRDNSKNTLYLQMNSLRAEDTAVYYC |
| | | ARYYFGLSSNWFNPWGQGTLVTVSS |
| CD40L- | 1509 | EVQLLESGGGLVQPGGSLRLSCAASGFAFSGYAMSWVRQAPGKGLEWV |
| 322 | | SAISGSGVSTDYADSVKGRFTISRDNSKNTLYLQMNSLRAEDTAVYYC |
| | | ARDSSGWYEYFQHWGQGTLVTVSS |
| CD40L- | 1510 | EVQLLESGGGLVQPGGSLRLSCAASGFTFSKYAMNWVRQAPGKGLEWV |
| 323 | | SAISGSGESTYYADSVKGRFTISRDNSKNTLYLQMNSLRAEDTAVYYC |
| | | ARAHDYDSMLMDYWGQGTLVTVSS |
| CD40L- | 1511 | EVQLLESGGGLVQPGGSLRLSCAASGFTFRSYDMSWVRQAPGKGLEWV |
| 324 | | SGISASGGSTYYADSVKGRFTISRDNSKNTLYLQMNSLRAEDTAVYYC |
| | | AKDATSRWYGEIDYWGQGTLVTVSS |
| CD40L- | 1512 | EVQLLESGGGLVQPGGSLRLSCAASGFRFGNYAMSWVRQAPGKGLEWV |
| 325 | | SSITGSGGRTYYADSVKGRFTISRDNSKNTLYLQMNSLRAEDTAVYYC |
| | | ARHVDSRRFAELSIEYWGQGTPVTVSS |
| CD40L- | 1513 | EVQLLESGGGLVQPGGSLRLSCAASGFTFSNYAMTWVRQAPGKGLEWV |
| 326 | | SSISGSGGSTIYADSVKGRFTISRDNSKNTLYLQMNSLRAEDTAVYYC |
| | | GKAYDTGGWYGGLDNWGQGTLVTVSS |
| CD40L- | 1514 | EVQLLESGGGLVQPGGSLRLSCAASGFPFGSYAMSWVRQAPGKGLEWV |
| 327 | | SVISGSGGTTYFADSVKGRFTISRDNSKNTLYLQMNSLRAEDTAVYYC |
| | | ARDVSSSGWYNRLGYWGQGTLVTVSS |
| CD40L- | 1515 | EVQLLESGGGLVQPGGSLRLSCAASGFTFSSYDMNWVRQAPGKGLEWV |
| 328 | | SGISSGGGFTYYADSVKGRFTISRDNSKNTLYLQMNSLRAEDTAVYYC |
| | | ARDPNPYSSSSSWGYWGQGTLVTVSS |
| CD40L- | 1516 | EVQLLESGGGLVQPGGSLRLSCAASGFTFTKYAMNWVRQAPGKGLEWV |
| 329 | | SAISGSGESTYYADSVKGRFTISRDNSKNTLYLQMNSLRAEDTAVYYC |
| | | ARAHDYDSMLMDYWGQGTLVTVSS |
| CD40L- | 1517 | EVQLLESGGGLVQPGGSLRLSCAASGFTFSKYAMNWVRQAPGKGLEWV |
| 330 | | SAISGSGESTYYADSVKGRFTISRDNSKNTLYLQMNSLRAEDTAVYYC |
| | | ARAHDYDSMLMDYWGQGTLVTVSS |
| CD40L- | 1518 | EVQLLESGGGLVQPGGSLRLSCAASGFTFDDYAMSWVRQAPGKGLEWV |
| 331 | | SAITGSGSGTSTYYADSVKGRFTISRDNSKNTLYLQMNSLRAEDTAVY |
| | | YCARHQNYYYYGMDVWGQGTLVTVSS |
| CD40L- | 1519 | EVQLLESGGGLVQPGGSLRLSCAASGIHFSNYAMSWVRQAPGKGLEWV |
| 332 | | SDISGSGGGTYYADSVKGRFTISRDNSKNTLYLQMNSLRAEDTAVYYC |
| | | AKVNDQNIPVAAFDYWGQGTLVTVSS |
| CD40L- | 1520 | EVQLLESGGGLVQPGGSLRLSCAASGFTFRDYAMSWVRQAPGKGLEWV |
| 333 | | AAISGSGVSTDYADSVKGRFTISRDNSKNTLYLQMNSLRAEDTAVYYC |
| | | ARGLDTAMVPFDYWGQGTLVTVSS |
| CD40L- | 1521 | EVQLLESGGGLVQPGGSLRLSCAASGFTFSKYAMNWVRQAPGKGLEWV |
| 334 | | SAISGSGESTYYADSVKGRFTISRDNSKNTLYLQMNSLRAEDTAVYYC |
| | | ARAHDYDSMLMDYWGQGTLVTVSS |
| CD40L- | 1522 | EVQLLESGGGLVQPGGSLRLSCAASGFTFSKYAMSWVRQAPGKGLEWV |
| 335 | | SAISGSGSSTYYADSVKGRFTISRDNSKNTLYLQMNSLRAEDTAVYYC |
| | | ARAHDYDSMLMDYWGQGTLVTVSS |
| CD40L- | 1523 | EVQLLESGGGLVQPGGSLRLSCAASGFTFTTYAMSWVRQAPGKGLEWV |
| 336 | | SAISSTGGSTYYADSVKGRFTISRDNSKNTLYLQMNSLRAEDTAVYYC |
| | | AKGGGYYYNMDVWGRGTLVTVSS |
| CD40L- | 1524 | EVQLLESGGGLVQPGGSLRLSCAASGFTFRSYDMTWVRQAPGKGLEWV |
| 337 | | SGISASGGSTYYADSVKGRFTISRDNSKNTLYLQMNSLRAEDTAVYYC |
| | | AKDATSHWYGEIYYWGQGTLVTVSS |
| CD40L- | 1525 | EVQLLESGGGLVQPGGSLRLSCAASGFTFGSFAMNWVRQAPGKGLEWV |
| 338 | | SAITGGGGSTYYADSVKGRFTISRDNSKNTLYLQMNSLRAEDTAVYYC |
| | | AHGLAWRWGFDYWGQGTLVTVSS |
| CD40L- | 1526 | EVQLLESGGGLVQPGGSLRLSCAASGFTFSNYAMSWVRQAPGKGLEWV |
| 339 | | SAITGSGSTTYYADSVKGRFTISRDNSKNTLYLQMNSLRAEDTAVYYC |
| | | ARAHDYDSMLMDYWGQGTLVTVSS |
| CD40L- | 1527 | EVQLLESGGGLVQPGGSLRLSCAASGFGFSSYAMSWVRQAPGKGLEWV |
| 340 | | SAISGGGGSIYYADSVKGRFTISRDNSKNTLYLQMNSLRAEDTAVYYC |
| | | ATDYGDYDRLNFDLWGQGTLVTVSS |
| CD40L- | 1528 | EVQLLESGGGLVQPGGSLRLSCAASGFTFRSYAMTWVRQAPGKGLEWV |
| 341 | | SAISGSGDRTYYGDSVKGRFTISRDNSKNTLYLQMNSLRAEDTAVYYC |
| | | ARIARSEDFWSGYYTDFDFDYWGQGTLVTVSS |
| CD40L- | 1529 | EVQLLESGGGLVQPGGSLRLSCAASGFTFSKYAMNWVRQAPGKGLEWV |
| 342 | | SAISGSGESTYYADSVKGRFTISRDNSKNTLYLQMNSLRAEDTAVYYC |
| | | ARAHDYDSMLMDYWGQGTLVTVSS |
| CD40L- | 1530 | EVQLLESGGGLVQPGGSLRLSCAASGFTFSKYAMNWVRQAPGKGLEWV |
| 343 | | SAISGSGESTYYADSVKGRFTISRDNSKNTLYLQMNSLRAEDTAVYYC |
| | | ARAHDYDSMLMDYWGQGTLVTVSS |
| CD40L- | 1531 | EVQLLESGGGLVQPGGSLRLSCAASGFTFSKYAMNWVRQAPGKGLEWV |
| 344 | | SAISGSGESTYYADSVKGRFTISRDNSKNTLYLQMNSLRAEDTAVYYC |
| | | ARAHDYDSMLMDYWGQGTLVTVSS |
| CD40L- | 1532 | EVQLLESGGGLVQPGGSLRLSCAASGFTFSSYAMSWVRQAPGKGLEWV |
| 345 | | SAISGSGGSTYYADSVKGRFTISRDNSKNTLYLQMNSLRAEDTAVYYC |
| | | ARERGDYYYYGMDVWGQGTLVTVSS |
| CD40L- | 1533 | EVQLLESGGGLVQPGGSLRLSCAASGFTFRTYAMGWVRQAPGKGLEWV |
| 346 | | SAISGSGGIAYYADSVKGRFTISRDNSKNTLYLQMNSLRAEDTAVYYC |
| | | ARHYYYDSSDAFDIWGQGTLVTISS |
| CD40L- | 1534 | EVQLLESGGGLVQPGGSLRLSCAASGFTFSNYAMSWVRQAPGKGLEWV |
| 347 | | SAITGSGSTTYYADSVKGRFTISRDNSKNTLYLQMNSLRAEDTAVYYC |
| | | ARAHDYDSMLMDYWGQGTLVTVSS |
| CD40L- | 1535 | EVQLLESGGGLVQPGGSLRLSCAASGFTFSSYAMSWVRQAPGKGLEWV |
| 348 | | SAISGSGGSTYYADSVKGRFTISRDNSKNTLYLQMNSLRAEDTAVYYC |
| | | ARERGDYYYYGMDVWGQGTLVTVSS |
| CD40L- | 1536 | EVQLLESGGGLVQPGGSLRLSCAASGFGFSSYAMSWVRQAPGKGLEWV |
| 349 | | SAISGGGGSIYYADSVKGRFTISRDNSKNTLYLQMNSLRAEDTAVYYC |
| | | ATDYGDYDRLNFDLWGQGTLVTVSS |
| CD40L- | 1537 | EVQLLESGGGLVQPGGSLRLSCAASGLTFGSYAMSWVRQAPGKGLEWV |
| 350 | | SAISGSVGSTYYADSVKGRFTISRDNSKNTLYLQMNSLRAEDTAVYYC |
| | | ARHGGYYYYYMDVWGQGTLVTVSS |
| CD40L- | 1538 | EVQLLESGGGLVQPGGSLRLSCAASGFTFRTYAMGWVRQAPGKGLEWV |
| 351 | | SAISGSGGIAYYADSVKGRFTISRDNSKNTLYLQMNSLRAEDTAVYYC |
| | | ARHYYYDSSDAFDIWGQGTLVTISS |
| CD40L- | 1539 | EVQLLESGGGLVQPGGSLRLSCAASGFTFRDYAMNWVRQAPGKGLEWV |
| 352 | | SAISGSGESTYYADSVKGRFTISRDNSKNTLYLQMNSLRAEDTAVYYC |
| | | ARAHDYDSMLMDYWGQGTLVTVSS |
| CD40L- | 1540 | EVQLLESGGGLVQPGGSLRLSCAASGFTSSTYAMSWVRQAPGKGLEWV |
| 353 | | SAISSTGGSTYYADSVKGRFTISRDNSKNTLYLQMNSLRAEDTAVYYC |
| | | AKGGGYYYNMDVWGQGTLVTVSS |
| CD40L- | 1541 | EVQLLESGGGLVQPGGSLRLSCAASGFSFSSYAMAWVRQAPGKGLEWV |
| 354 | | SSISGSGGGGNTYYADSVKGRFTISRDNSKNTLYLQMNSLRAEDTAVY |
| | | YCARHHERDYYGMDVWGQGTLVTVSS |
| CD40L- | 1542 | EVQLLESGGGLVQPGGSLRLSCAASGFIFSNYDMSWVRQAPGKGLEWV |
| 355 | | SGISGSGGSTSYADSVKGRFTISRDNSKNTLYLQMNSLRAEDTAVYYC |
| | | ARHGGYNPYGLDYWGQGTLVTVSS |
| CD40L- | 1543 | EVQLLESGGGLVQPGGSLRLSCAASGFTFSNYAMSWVRQAPGKGLEWV |
| 356 | | SAITGSGSTTYYADSVKGRFTISRDNSKNTLYLQMNSLRAEDTAVYYC |
| | | ARAHDYDSMLMDYWGQGTLVTVSS |
| CD40L- | 1544 | EVQLLESGGGLVQPGGSLRLSCAASGFTFSYYGMSWVRQAPGKGLEWV |
| 357 | | STISGSTGSTYYADSVKGRFTISRDNSKNTLYLQMNSLRAEDTAVYYC |
| | | ASSPPFYYYMDVWGQGTLVTVSS |
| CD40L- | 1545 | EVQLLESGGGLVQPGGSLRLSCAASGFTFSTYAMNWVRQAPGKGLEWV |
| 358 | | SAISGSGGTTYYADSVKGRFTISRDNSKNTLYLQMNSLRAEDTAVYYC |
| | | ARGPNNWNYVSFDYWGQGTLVTVSS |
| CD40L- | 1546 | EVQLLESGGGLVQPGGSLRLSCAASGYTFSSYAMSWVRQAPGKGLEWV |
| 359 | | SGISGGGTSTYYADSVKGRFTISRDNSKNTLYLQMNSLRAEDTAVYYC |
| | | ARFGNHYDRTGYSDYWGQGTLVTVSS |
| CD40L- | 1547 | EVQLLESGGGLVQPGGSLRLSCAASGFTFGRYAMSWVRQAPGKGLEWV |
| 360 | | SDISGSGGSTYYADSVKGRFTISRDNSKNTLYLQMNSLRAEDTAVYYC |
| | | ARDGFRWGRAEYFQHWGQGTLVTVSS |
| CD40L- | 1548 | EVQLLESGGGLVQPGGSLRLSCAASGFTFSSHDMSWVRQAPGKGLEWV |
| 361 | | SGISGSGYSTYYADSVKGRFTISRDNSKNTLYLQMNSLRAEDTAVYYC |
| | | ARDQGDMDVWGQGTLVTVSS |
| CD40L- | 1549 | EVQLLESGGGLVQPGGSLRLSCAASGFTFTSYAMSWVRQAPGKGLEWV |
| 362 | | SGISGSGINTYYADSVKGRFTISRDNSRNTLYLQMNSLRAEDTAVYYC |
| | | VRSSWSDVWGQGTLVTVSS |
| CD40L- | 1550 | EVQLLESGGGLVQPGGSLRLSCAASGFTFSDYDMSWVRQAPGKGLEWV |
| 363 | | SGISGSGATTYYADSVKGRFTISRDNSKNTLYLQMNSLRAEDTAVYYC |
| | | ARDSSGSYYYPLDYWGQGTLVTVSS |
| CD40L- | 1551 | EVQLLESGGGLVQPGGSLRLSCAASGFTFSPYAMSWVRQAPGKGLEWV |
| 364 | | SSITGTGGSTYYADSVKGRFTISRDNSKNTLYLQMNSLRAEDTAVYYC |
| | | ARSWASEDFDWLPNFDFWGQGTLVTVSS |
| CD40L- | 1552 | EVQLLESGGGLVQPGGSLRLSCAASGFTFSYYAMTWVRQAPGKGLEWV |
| 365 | | SGISGSGGSSYYADSVKGRFTISRDNSKNTLYLQMNSLRAEDTAVYYC |
| | | ARSHDYDRQTFDYWGQGTLVTVSS |
| CD40L- | 1553 | EVQLLESGGGLVQPGGSLRLSCAASGFGFSSYAMSWVRQAPGKGLEWV |
| 366 | | SAITGSGSTTYYADSVKGRFTISRDNSKNTLYLQMNSLRAEDTAVYYC |
| | | ARAHDYDSMLMDYWGQGTLVTVSS |
| CD40L- | 1554 | EVQLLESGGGLVQPGGSLRLSCAASGFTFRTYAMGWVRQAPGKGLEWV |
| 367 | | SAISGSGGIAYYADSVKGRFTISRDNSKNTLYLQMNSLRAEDTAVYYC |
| | | ARAHDYDSMLMDYWGQGTLVTVSS |
| CD40L- | 1555 | EVQLLESGGGLVQPGGSLRLSCAASGFTFSSYAMSWVRQAPGKGLEWV |
| 368 | | SAISGSGGSTYYADSVKGRFTISRDNSKNTLYLQMNSLRAEDTAVYYC |
| | | ARERGDYYYYGMDVWGQGTLVTVSS |
| CD40L- | 1556 | EVQLLESGGGLVQPGGSLRLSCAASGFTFSSYAMSWVRQAPGKGLEWV |
| 369 | | SAISGSGGSTYYADSVKGRFTISRDNSKNTLYLQMNSLRAEDTAVYYC |
| | | ARERGDYYYYGMDVWGQGTLVTVSS |
| CD40L- | 1557 | EVQLLESGGGLVQPGGSLRLSCAASGFTFSSFDMTWVRQAPGKGLEWV |
| 370 | | SGISGSGGTTFYADSVKGRFTISRDNSKNTLYLQMNSLRAEDTAVYYC |
| | | VRDVSDIYGYLDDAFDIWGQGTLVTVSS |
| CD40L- | 1558 | EVQLLESGGGLVQPGGSLRLSCAASGFTSNIYAMSWVRQAPGKGLEWV |
| 371 | | SAISGSGFSTYYADSVKGRFTISRDNSKNTLYLQMNSLRAEDTAVYYC |
| | | AKLAQNYGDPDAFDIWGQGTLVTVSS |
| CD40L- | 1559 | EVQLLESGGGLVQPGGSLRLSCAASGFTFTSYAMTWVRQAPGKGLEWV |
| 372 | | SSITSSGGSTYYADSVKGRFTISRDNSKNTLYLQMNSLRAEDTAVYYC |
| | | ARAHDYDSMLMDYWGQGTLVTVSS |
| CD40L- | 1560 | EVQLLESGGGLVQPGGSLRLSCAASGFTFRTYAMGWVRQAPGKGLEWV |
| 373 | | SAISGSGGIAYYADSVKGRFTISRDNSKNTLYLQMNSLRAEDTAVYYC |
| | | ARHYYYDSSDAFDIWGQGTLVTISS |
| CD40L- | 1561 | EVQLLESGGGLVQPGGSLRLSCAASGFTFDTYAMNWVRQAPGKGLEWV |
| 374 | | SAISGTGGTTYYADSVKGRFTISRDNSKNTLYLQMNSLRAEDTAVYYC |
| | | AKEGEGYSYGLHYWGQGTLVTVSS |
| CD40L- | 1562 | EVQLLESGGGLVQPGGSLRLSCAASGFTFSTNDMSWVRQAPGKGLEWV |
| 375 | | SAVSGSGGNTYYADSVKGRFTISRDNSKNTLYLQMNSLRAEDTAVYYC |
| | | VRVSGYSSSWYIDSWGQGTLVTVSS |
| CD40L- | 1563 | EVQLLESGGGLVQPGGSLRLSCAASGFTFSSYAMSWVRQAPGKGLEWV |
| 376 | | SAISASGGTTYYADSVKGRFTISRDNSKNTLYLQMNSLRAEDTAVYYC |
| | | ARSHDYDRQTFDYWGQGTLVTVSS |
| CD40L- | 1564 | EVQLLESGGGLVQPGGSLRLSCAASGFTFRSYDMSWVRQAPGKGLEWV |
| 377 | | SGISASGGSTYYADSVKGRFTISRDNSKNTLYLQMNSLRAEDTAVYYC |
| | | ARAHDYDSMLMDYWGQGTLVTVSS |
| CD40L- | 1565 | EVQLLESGGGLVQPGGSLRLSCAASGFTFRSYAMTWVRQAPGKGLEWV |
| 378 | | SAISGSGDRTYYGDSVKGRFTISRDNSKNTLYLQMNSLRAEDTAVYYC |
| | | ARIARSEDFWSGYYTDFDFDYWGQGTLVTVSS |
| CD40L- | 1566 | EVQLLESGGGLVQPGGSLRLSCAASGFTFGSFAMNWVRQAPGKGLEWV |
| 379 | | SAITGGGGSTYYADSVKGRFTISRDNSKNTLYLQMNSLRAEDTAVYYC |
| | | AHGLAWRWGFDYWGQGTLVTVSS |
| CD40L- | 1567 | EVQLLESGGGLVQPGGSLRLSCAASGFGFSSYAMSWVRQAPGKGLEWV |
| 380 | | SAISGGGGSIYYADSVKGRFTISRDNSKNTLYLQMNSLRAEDTAVYYC |
| | | ARAHDYDSMLMDYWGQGTLVTVSS |
| CD40L- | 1568 | EVQLLESGGGLVQPGGSLRLSCAASGFTFSSYDMNWVRQAPGKGLEWV |
| 381 | | AAISGSGGTTYYADSVKGRFTISRDNSKNTLYLQMNSLRAEDTAVYYC |
| | | ARGVYESMTGTYGYVDWFDPWGQGTLVTVSS |
| CD40L- | 1569 | EVQLLESGGGLVQPGGSLRLSCAASGFGFSSYAMSWVRQAPGKGLEWV |
| 382 | | SAISGGGGSIYYADSVKGRFTISRDNSKNTLYLQMNSLRAEDTAVYYC |
| | | ATDYGDYDRLNFDLWGQGTLVTVSS |
| CD40L- | 1570 | EVQLLESGGGLVQPGGSLRLSCAASGFTFSNYAMSWVRQAPGKGLEWV |
| 383 | | SAITGSGSTTYYADSVKGRFTISRDNSKNTLYLQMNSLRAEDTAVYYC |
| | | ARAHDYDSMLMDYWGQGTLVTVSS |
| CD40L- | 1571 | EVQLLESGGGLVQPGGSLRLSCAASGFTFSNYAMSWVRQAPGKGLEWV |
| 384 | | SAITGSGSTTYYADSVKGRFTISRDNSKNTLYLQMNSLRAEDTAVYYC |
| | | ARAHDYDSMLMDYWGQGTLVTVSS |
| CD40L- | 1572 | EVQLLESGGGLVQPGGSLRLSCAASGFTFSNYAMSWVRQAPGKGLEWV |
| 385 | | SAITGSGSTTYYADSVKGRFTISRDNSKNTLYLQMNSLRAEDTAVYYC |
| | | ARAHDYDSMLMDYWGQGTLVTVSS |
| CD40L- | 1573 | EVQLLESGGGLVQPGGSLRLSCAASGFTFSSYAMSWVRQAPGKGLEWV |
| 386 | | SAISGSGGSTYYADSVKGRFTISRDNSKNTLYLQMNSLRAEDTAVYYC |
| | | ARERGDYYYYGMDVWGQGTLVTVSS |
| CD40L- | 1574 | EVQLLESGGGLVQPGGSLRLSCAASGFTFSSYAMSWVRQAPGKGLEWV |
| 387 | | SAISGSGGSTYYADSVKGRFTISRDNSKNTLYLQMNSLRAEDTAVYYC |
| | | ARERGDYYYYGMDVWGQGTLVTVSS |
| CD40L- | 1575 | EVQLLESGGGLVQPGGSLRLSCAASGFTFRTYAMGWVRQAPGKGLEWV |
| 388 | | SAISGSGGIAYYADSVKGRFTISRDNSKNTLYLQMNSLRAEDTAVYYC |
| | | ARHYYYDSSDAFDIWGQGTLVTISS |
| CD40L- | 1576 | EVQLLESGGGLVQPGGSLRLSCAASGFTFSKYAMNWVRQAPGKGLEWV |
| 389 | | SAISGSGESTYYADSVKGRFTISRDNSKNTLYLQMNSLRAEDTAVYYC |
| | | TRGGLQDQIGHFQHWGQGTLVTVSS |
| CD40L- | 1577 | EVQLLESGGGLVQPGGSLRLSCAASGFIFSNYDMSWVRQAPGKGLEWV |
| 390 | | SGISGSGGSTSYADSVKGRFTISRDNSKNTLYLQMNSLRAEDTAVYYC |
| | | ARHGGYNPYGLDYWGQGTLVTVSS |
| CD40L- | 1578 | EVQLLESGGGLVQPGGSLRLSCAASGLTFGSYAMSWVRQAPGKGLEWV |
| 391 | | SAISGSVGSTYYADSVKGRFTISRDNSKNTLYLQMNSLRAEDTAVYYC |
| | | ARHGGYYYYYMDVWGQGTLVTVSS |
| CD40L- | 1579 | EVQLLESGGGLVQPGGSLRLSCAASGFTFSSFDMTWVRQAPGKGLEWV |
| 392 | | SGISGSGGTTFYADSVKGRFTISRDNSKNTLYLQMNSLRAEDTAVYYC |
| | | VRDVSDIYGYLDDAFDIWGQGTLVTVSS |
| CD40L- | 1580 | EVQLLESGGGLVQPGGSLRLSCAASGFTFSSYAMSWVRQAPGKGLEWV |
| 393 | | SAISGSGGSTYYADSVKGRFTISRDNSKNTLYLQMNSLRAEDTAVYYC |
| | | ARERGDYYYYGMDVWGQGTLVTVSS |
| CD40L- | 1581 | EVQLLESGGGLVQPGGSLRLSCAASGFTFSDYVMGWVRQAPGKGLEWV |
| 394 | | SAISGSGGSTYYTDSVKGRFTISRDNSKNTLYLQMNSLRAEDTAVYYC |
| | | AKDAGRGSAWYGYAFDIWGQGTLVTVSS |
| CD40L- | 1582 | EVQLLESGGGLVQPGGSLRLSCAASGFTFSYYGMSWVRQAPGKGLEWV |
| 395 | | SAISGSGESTYYADSVKGRFTISRDNSKNTLYLQMNSLRAEDTAVYYC |
| | | ARAHDYDSMLMDYWGQGTLVTVSS |
| CD40L- | 1583 | EVQLLESGGGLVQPGGSLRLSCAASGFSFSSYAMAWVRQAPGKGLEWV |
| 396 | | SSISGSGGGGNTYYADSVKGRFTISRDNSKNTLYLQMNSLRAEDTAVY |
| | | YCARHHERDYYGMDVWGQGTLVTVSS |
| CD40L- | 1584 | EVQLLESGGGLVQPGGSLRLSCAASGVTFRNYAMSWVRQAPGKGLEWV |
| 397 | | SAISGSGSSTFYADSVKGRFTISRDNSKNTLYLQMNSLRAEDTAVYYC |
| | | ARGSLAYDYIADYWGQGTLVTVSS |
| CD40L- | 1585 | EVQLLESGGGLVQPGGSLRLSCAASGFTFSNYAMSWVRQAPGKGLEWV |
| 398 | | SAITGSGSTTYYADSVKGRFTISRDNSKNTLYLQMNSLRAEDTAVYYC |
| | | ARAHDYDSMLMDYWGQGTLVTVSS |
| CD40L- | 1586 | EVQLLESGGGLVQPGGSLRLSCAASGLTFGSYAMSWVRQAPGKGLEWV |
| 399 | | SAISGSVGSTYYADSVKGRFTISRDNSKNTLYLQMNSLRAEDTAVYYC |
| | | ARAHDYDSMLMDYWGQGTLVTVSS |
| CD40L- | 1587 | EVQLLESGGGLVQPGGSLRLSCAASGFTFSTYAMNWVRQAPGKGLEWV |
| 400 | | SAISGSGGTTYYADSVKGRFTISRDNSKNTLYLQMNSLRAEDTAVYYC |
| | | ARGPNNWNYVSFDYWGQGTLVTVSS |
| CD40L- | 1588 | EVQLLESGGGLVQPGGSLRLSCAASGFTFGNYAMTWVRQAPGKGLEWV |
| 401 | | SAISGLGGSTYYADSVKGRFTISRDNSKNTLYLQMNSLRAEDTAVYYC |
| | | TSSDPTYYYDSNGKSSLGMDVWGQGTLVTVSS |
| CD40L- | 1589 | EVQLLESGGGLVQPGGSLRLSCAASGFTSSTYAMSWVRQAPGKGLEWV |
| 402 | | SAISSTGGSTYYADSVKGRFTISRDNSKNTLYLQMNSLRAEDTAVYYC |
| | | AKGGGYYYNMDVWGQGTLVTVSS |
| CD40L- | 1590 | EVQLLESGGGLVQPGGSLRLSCAASGFTFRNYGMNWVRQAPGKGLEWV |
| 403 | | SSISGSGDYTYYADSVKGRFTISRDNSKNTLYLQMNSLRAEDTAVYYC |
| | | ARGLTYDILPRFDSWGQGTLVTVSS |
| CD40L- | 1591 | EVQLLESGGGLVQPGGSLRLSCAASGFTFRTYAMGWVRQAPGKGLEWV |
| 404 | | SAISGSGGIAYYADSVKGRFTISRDNSKNTLYLQMNSLRAEDTAVYYC |
| | | ARHYYYDSSDAFDIWGQGTLVTISS |
| CD40L- | 1592 | EVQLLESGGGLVQPGGSLRLSCAASGFTFSSYAMSWVRQAPGKGLEWV |
| 405 | | SAISGSGGSTYYADSVKGRFTISRDNSKNTLYLQMNSLRAEDTAVYYC |
| | | ARERGDYYYYGMDVWGQGTLVTVSS |
| CD40L- | 1593 | EVQLLESGGGLVQPGGSLRLSCAASGFTFSNYAMHWVRQAPGKGLEWV |
| 406 | | SAISGSGGIAYYADSVKGRFTISRDNSKNTLYLQMNSLRAEDTAVYYC |
| | | ARHYYYDSSDAFDIWGQGTLVTISS |
| CD40L- | 1594 | EVQLLESGGGLVQPGGSLRLSCAASGFTFTSYSMSWVRQAPGKGLEWV |
| 407 | | SGISGSGGSTHYVDSVKGRFTISRDNSKNTLYLQMNSLRAEDTAVYYC |
| | | ARRSYFSSGSALDYWGQGTLVTVSS |
| CD40L- | 1595 | EVQLLESGGGLVQPGGSLRLSCAASGYTFSSYAMSWVRQAPGKGLEWV |
| 408 | | SGISGGGTSTYYADSVKGRFTISRDNSKNTLYLQMNSLRAEDTAVYYC |
| | | ARFGNHYDRTGYSDYWGQGTLVTVSS |
| CD40L- | 1596 | EVQLLESGGGLVQPGGSLRLSCAASGLTFGSYAMSWVRQAPGKGLEWV |
| 409 | | SAISGSVGSTYYADSVKGRFTISRDNSKNTLYLQMNSLRAEDTAVYYC |
| | | ARHGGYYYYYMDVWGQGTLVTVSS |
| CD40L- | 1597 | EVQLLESGGGLVQPGGSLRLSCAASGFTFRTYAMGWVRQAPGKGLEWV |
| 410 | | SAISGSGGIAYYADSVKGRFTISRDNSKNTLYLQMNSLRAEDTAVYYC |
| | | ARHYYYDSSDAFDIWGQGTLVTISS |
| CD40L- | 1598 | EVQLLESGGGLVQPGGSLRLSCAASGFTFSNYAMSWVRQAPGKGLEWV |
| 411 | | SAITGSGSTTYYADSVKGRFTISRDNSKNTLYLQMNSLRAEDTAVYYC |
| | | TSSDPTYYYDSNGKSSLGMDVWGQGTLVTVSS |
| CD40L- | 1599 | EVQLLESGGGLVQPGGSLRLSCAASGFIFSNYDMSWVRQAPGKGLEWV |
| 412 | | SGISGSGGSTSYADSVKGRFTISRDNSKNTLYLQMNSLRAEDTAVYYC |
| | | ARHGGYNPYGLDYWGQGTLVTVSS |
| CD40L- | 1600 | EVQLLESGGGLVQPGGSLRLSCAASGFTFRTYAMGWVRQAPGKGLEWV |
| 413 | | SAISGSGGIAYYADSVKGRFTISRDNSKNTLYLQMNSLRAEDTAVYYC |
| | | ARHYYYDSSDAFDIWGQGTLVTISS |
| CD40L- | 1601 | EVQLLESGGGLVQPGGSLRLSCAASGFTFSNYAMSWVRQAPGKGLEWV |
| 414 | | SAITGSGSTTYYADSVKGRFTISRDNSKNTLYLQMNSLRAEDTAVYYC |
| | | ATDYGDYDRLNFDLWGQGTLVTVSS |
| CD40L- | 1602 | EVQLLESGGGLVQPGGSLRLSCAASGFSFRSYAMSWVRQAPGKGLEWV |
| 415 | | SIISGSGGSTSYADSVKGRFTISRDNSKNTLYLQMNSLRAEDTAVYYC |
| | | TRGGLQDQIGHFQHWGQGTLVTVSS |
| CD40L- | 1603 | EVQLLESGGGLVQPGGSLRLSCAASGFTFSNYAMSWVRQAPGKGLEWV |
| 416 | | SAISGSGHSTYYADSVKGRFTISRDNSKNTLYLQMNSLRAEDTAVYYC |
| | | ARGGGYYNPLLFDYWGQGTLVTVSS |
| CD40L- | 1604 | EVQLLESGGGLVQPGGSLRLSCAASGFTFSKYAMNWVRQAPGKGLEWV |
| 417 | | SAISGSGESTYYADSVKGRFTISRDNSKNTLYLQMNSLRAEDTAVYYC |
| | | ARHGGYYYYYMDVWGQGTLVTVSS |
| CD40L- | 1605 | EVQLLESGGGLVQPGGSLRLSCAASGFTFGRYAMSWVRQAPGKGLEWV |
| 418 | | SDISGSGGSTYYADSVKGRFTISRDNSKNTLYLQMNSLRAEDTAVYYC |
| | | ARDGFRWGRAEYFQHWGQGTLVTVSS |
| CD40L- | 1606 | EVQLLESGGGLVQPGGSLRLSCAASGFTFSNYAMSWVRQAPGKGLEWV |
| 419 | | SAITGSGSTTYYADSVKGRFTISRDNSKNTLYLQMNSLRAEDTAVYYC |
| | | ARAHDYDSMLMDYWGQGTLVTVSS |
| CD40L- | 1607 | EVQLLESGGGLVQPGGSLRLSCAASGFGFSSYAMSWVRQAPGKGLEWV |
| 420 | | SAISGGGGSIYYADSVKGRFTISRDNSKNTLYLQMNSLRAEDTAVYYC |
| | | AKPDVLFDYWGQGTLVTVSS |
| CD40L- | 1608 | EVQLLESGGGLVQPGGSLRLSCAASGFTFSKYAMNWVRQAPGKGLEWV |
| 421 | | SAISGSGESTYYADSVKGRFTISRDNSKNTLYLQMNSLRAEDTAVYYC |
| | | ATDYGDYDRLNFDLWGQGTLVTVSS |
| CD40L- | 1609 | EVQLLESGGGLVQPGGSLRLSCAASGFTFSSYAMSWVRQAPGKGLEWV |
| 422 | | SAISGSGGSTYYADSVKGRFTISRDNSKNTLYLQMNSLRAEDTAVYYC |
| | | ARERGDYYYYGMDVWGQGTLVTVSS |
| CD40L- | 1610 | EVQLLESGGGLVQPGGSLRLSCAASGFTFSTSAMSWVRQAPGKGLEWV |
| 423 | | SGISGSGGYTYYADSVKGRFTISRDNSKNTLYLQMNSLRAEDTAVYYC |
| | | ASTDDHYYGMDVWGQGTLVTVSS |
| CD40L- | 1611 | EVQLLESGGGLVQPGGSLRLSCAASGFTFSNYAMSWVRQAPGKGLEWV |
| 424 | | SAITGSGSTTYYADSVKGRFTISRDNSKNTLYLQMNSLRAEDTAVYYC |
| | | AKGGGYYYNMDVWGQGTLVTVSS |
| CD40L- | 1612 | EVQLLESGGGLVQPGGSLRLSCAASGFTFRDYAMNWVRQAPGKGLEWV |
| 425 | | SAISGSGESTYYADSVKGRFTISRDNSKNTLYLQMNSLRAEDTAVYYC |
| | | ARAHDYDSMLMDYWGQGTLVTVSS |
| CD40L- | 1613 | EVQLLESGGGLVQPGGSLRLSCAASGFTFSNYAMSWVRQAPGKGLEWV |
| 426 | | SAISGSGESTYYADSVKGRFTISRDNSKNTLYLQMNSLRAEDTAVYYC |
| | | ARAHDYDSMLMDYWGQGTLVTVSS |
| CD40L- | 1614 | EVQLLESGGGLVQPGGSLRLSCAASGFTFSNYAMSWVRQAPGKGLEWV |
| 427 | | SAITGSGSTTYYADSVKGRFTISRDNSKNTLYLQMNSLRAEDTAVYYC |
| | | ASSPPFYYYMDVWGQGTLVTVSS |
| CD40L- | 1615 | EVQLLESGGGLVQPGGSLRLSCAASGFTFGNYAMTWVRQAPGKGLEWV |
| 428 | | SAISGLGGSTYYADSVKGRFTISRDNSKNTLYLQMNSLRAEDTAVYYC |
| | | TSSDPTYYYDSNGKSSLGMDVWGQGTLVTVSS |
| CD40L- | 1616 | EVQLLESGGGLVQPGGSLRLSCAASGFTFSSYAMSWVRQAPGKGLEWV |
| 429 | | SAISGSGGSTYYADSVKGRFTISRDNSKNTLYLQMNSLRAEDTAVYYC |
| | | ARERGDYYYYGMDVWGQGTLVTVSS |
| CD40L- | 1617 | EVQLLESGGGLVQPGGSLRLSCAASGFTFSSYAMSWVRQAPGKGLEWV |
| 430 | | SAISGSGGSTYYADSVKGRFTISRDNSKNTLYLQMNSLRAEDTAVYYC |
| | | ARHQNYYYYGMDVWGQGTLVTVSS |
| CD40L- | 1618 | EVQLLESGGGLVQPGGSLRLSCAASGFGFSSYAMSWVRQAPGKGLEWV |
| 431 | | SAISGGGGSIYYADSVKGRFTISRDNSKNTLYLQMNSLRAEDTAVYYC |
| | | TRGGLQDQIGHFQHWGQGTLVTVSS |
| CD40L- | 1619 | EVQLLESGGGLVQPGGSLRLSCAASGFTFSYYGMSWVRQAPGKGLEWV |
| 432 | | STISGSTGSTYYADSVKGRFTISRDNSKNTLYLQMNSLRAEDTAVYYC |
| | | ASSPPFYYYMDVWGQGTLVTVSS |
| CD40L- | 1620 | EVQLLESGGGLVQPGGSLRLSCAASGFTSSTYAMSWVRQAPGKGLEWV |
| 433 | | SAISSTGGSTYYADSVKGRFTISRDNSKNTLYLQMNSLRAEDTAVYYC |
| | | AKGGGYYYNMDVWGQGTLVTVSS |
| CD40L- | 1621 | EVQLLESGGGLVQPGGSLRLSCAASGFGFSSYAMSWVRQAPGKGLEWV |
| 434 | | SAISGGGGSIYYADSVKGRFTISRDNSKNTLYLQMNSLRAEDTAVYYC |
| | | ARHGGYYYYYMDVWGQGTLVTVSS |
| CD40L- | 1622 | EVQLLESGGGLVQPGGSLRLSCAASGFIFSNYDMSWVRQAPGKGLEWV |
| 435 | | SGISGSGGSTSYADSVKGRFTISRDNSKNTLYLQMNSLRAEDTAVYYC |
| | | ARHGGYNPYGLDYWGQGTLVTVSS |
| CD40L- | 1623 | EVQLLESGGGLVQPGGSLRLSCAASGFTFSSYAMSWVRQAPGKGLEWV |
| 436 | | SAISGSGGSTYYADSVKGRFTISRDNSKNTLYLQMNSLRAEDTAVYYC |
| | | ARERGDYYYYGMDVWGQGTLVTVSS |
| CD40L- | 1624 | EVQLLESGGGLVQPGGSLRLSCAASGFSFSSYAMAWVRQAPGKGLEWV |
| 437 | | SSISGSGGGGNTYYADSVKGRFTISRDNSKNTLYLQMNSLRAEDTAVY |
| | | YCARHHERDYYGMDVWGQGTLVTVSS |
| CD40L- | 1625 | EVQLLESGGGLVQPGGSLRLSCAASGFGFSSYAMSWVRQAPGKGLEWV |
| 438 | | SAISGGGGSIYYADSVKGRFTISRDNSKNTLYLQMNSLRAEDTAVYYC |
| | | ATDYGDYDRLNFDLWGQGTLVTVSS |
| CD40L- | 1626 | EVQLLESGGGLVQPGGSLRLSCAASGFAFSSYAMNWVRQAPGKGLEWV |
| 439 | | SGISGSGGITYYADSVKGRFTISRDNSKNTLYLQMNSLRAEDTAVYYC |
| | | ARGSAAAAGRAYYYYGMDVWGQGTLVTVSS |
| CD40L- | 1627 | EVQLLESGGGLVQPGGSLRLSCAASGFGFSSYAMSWVRQAPGKGLEWV |
| 440 | | SAISGGGGSIYYADSVKGRFTISRDNSKNTLYLQMNSLRAEDTAVYYC |
| | | AKDATSRWYGEIDYWGQGTLVTVSS |
| CD40L- | 1628 | EVQLLESGGGLVQPGGSLRLSCAASGFTFSKYAMNWVRQAPGKGLEWV |
| 441 | | SAISGSGESTYYADSVKGRFTISRDNSKNTLYLQMNSLRAEDTAVYYC |
| | | ARDQGDMDVWGQGTLVTVSS |

TABLE 12
TSLP Variable Light Chain Domain Sequences

| TSLP | SEQ ID | |
|---|---|---|
| Variant | NO | VL Sequence |
| TSLP-119 | 1629 | DIQMTQSPSSLSASVGDRVTITCRTSQSLSSYLHWYQQKPGKAPKLLIYG |
| | | QHNRPSGVPSRFSGSGSGTDFTLTISSLQPEDFATYYCQQSYRAPQTFGQ |
| | | GTKVEIK |
| TSLP-120 | 1630 | DIQMTQSPSSLSASVGDRVTITCRASQTIGTYLNWYQQKPGKAPKLLIYS |
| | | ASSLQSGVPSRFSGSGSGTDFTLTISSLQPEDFATYYCQQTDGNPPTFGQG |
| | | TKVEIK |
| TSLP-121 | 1631 | EIVLTQSPGTLSLSPGERATLSCRASQNVNTRYLAWYQQKPGQAPRLLIY |
| | | AASSRATGIPDRFSGSGSGTDFTLTISSLEPEDFAVYYCQQYESSPYNFGQ |
| | | GTKVEIK |
| TSLP-122 | 1632 | EIVLTQSPGTLSLSPGERATLSCRASQRITSSYLAWYQQKPGQAPRLLIYG |
| | | TSSRATGIPDRFSGSGSGTDFTLTISSLEPEDFAVYYCQQYGLSLLTFGQG |
| | | TKVEIK |
| TSLP-123 | 1633 | DIQMTQSPSSLSASVGDRVTITCKSSQSLLYSNGKTLSWYQQKPGKAPKL |
| | | LIYETSKLASGVPSRFSGSGSGTDFTLTISSLQPEDFATYYCKQSYTLRTFG |
| | | QGTKVEIK |
| TSLP-124 | 1634 | DIQMTQSPSSLSASVGDRVTITCRASQSIRRYLNWYQQKPGKAPKLLIYA |
| | | NTNGPSGVPSRFSGSGSGTDFTLTISSLQPEDFATYYCQPSFVFPYTFGQG |
| | | TKVEIK |
| TSLP-125 | 1635 | DIQMTQSPSSLSASVGDRVTITCRASQDIKNYLNWYQQKPGKAPKLLIYG |
| | | KKNRPSGVPSRFSGSGSGTDFTLTISSLQPEDFATYYCSQGTHVPPTFGQG |
| | | TKVEIK |
| TSLP-126 | 1636 | DIQMTQSPSSLSASVGDRVTITCSGDKGHTYTSWYQQKPGKAPKLLIYHT |
| | | SRLQDGVPSRFSGSGSGTDFTLTISSLQPEDFATYYCQQYDAYPPTFGQG |
| | | TKVEIK |
| TSLP-127 | 1637 | DIQMTQSPSSLSASVGDRVTITCSGHNLGDKFASWYQQKPGKAPKLLIYR |
| | | KSNRPSGVPSRFSGSGSGTDFTLTISSLQPEDFATYYCSARSVRGNPHVLF |
| | | GQGTKVEIK |
| TSLP-128 | 1638 | DIQMTQSPSSLSASVGDRVTITCTSSQSLFNVRSQKNYLAWYQQKPGKA |
| | | PKLLIYGASSRATGVPSRFSGSGSGTDFTLTISSLQPEDFATYYCAQTGTH |
| | | PTTFGQGTKVEIK |
| TSLP-129 | 1639 | DIQMTQSPSSLSASVGDRVTITCRASQSIRRYLNWYQQKPGKAPKLLIYT |
| | | ASNLQNGVPSRFSGSGSGTDFTLTISSLQPEDFATYYCQQSYSSAPTFGQG |
| | | TKVEIK |
| TSLP-130 | 1640 | DIQMTQSPSSLSASVGDRVTITCQASQSISSYLAWYQQKPGKAPKLLIYP |
| | | KHNRPPGVPSRFSGSGSGTDFTLTISSLQPEDFATYYCVSRSAKGNPHVLF |
| | | GQGTKVEIK |
| TSLP-131 | 1641 | DIQMTQSPSSLSASVGDRVTITCSASSVSSSYLHWYQQKPGKAPKLLIYE |
| | | DTKRPSGVPSRFSGSGSGTDFTLTISSLQPEDFATYYCQQSYTTPTTFGQG |
| | | TKVEIK |
| TSLP-132 | 1642 | DIQMTQSPSSLSASVGDRVTITCRASQSISNNLNWYQQKPGKAPKLLIYG |
| | | KNIRPSGVPSRFSGSGSGTDFTLTISSLQPEDFATYYCQQRSSPWTFGQGT |
| | | KVEIK |
| TSLP-133 | 1643 | DIQMTQSPSSLSASVGDRVTITCRASENIYSNLAWYQQKPGKAPKLLIYG |
| | | RNKRPSGVPSRFSGSGSGTDFTLTISSLQPEDFATYYCSQGTHVPPTFGQG |
| | | TKVEIK |
| TSLP-134 | 1644 | DIQMTQSPSSLSASVGDRVTITCRASQSIRRYLNWYQQKPGKAPKLLIYH |
| | | TSRLQDGVPSRFSGSGSGTDFTLTISSLQPEDFATYYCSQSTRVPYTFGQG |
| | | TKVEIK |
| TSLP-135 | 1645 | DIQMTQSPSSLSASVGDRVTITCTSSQSLFNVRSQKNYLAWYQQKPGKA |
| | | PKLLIYDASNLQSGVPSRFSGSGSGTDFTLTISSLQPEDFATYYCSSRSRH |
| | | GNPHVLFGQGTKVEIK |
| TSLP-136 | 1646 | DIQMTQSPSSLSASVGDRVTITCQGASLRNYYASWYQQKPGKAPKLLIY |
| | | GTSYRYSGVPSRFSGSGSGTDFTLTISSLQPEDFATYYCQAWDNGAAVFG |
| | | QGTKVEIK |
| TSLP-137 | 1647 | DIQMTQSPSSLSASVGDRVTITCSASSSVTYMHWYQQKPGKAPKLLIYA |
| | | ASKLASGVPSRFSGSGSGTDFTLTISSLQPEDFATYYCQQGDALPPTFGQG |
| | | TKVEIK |
| TSLP-138 | 1648 | DIQMTQSPSSLSASVGDRVTITCSGNKLGDKYASWYQQKPGKAPKLLIY |
| | | QMSHLASGVPSRFSGSGSGTDFTLTISSLQPEDFATYYCASRSSKGNPHV |
| | | LFGQGTKVEIK |
| TSLP-139 | 1649 | DIQMTQSPSSLSASVGDRVTITCRASQNIYQNLDWYQQKPGKAPKLLIYG |
| | | ASNLHSGVPSRFSGSGSGTDFTLTISSLQPEDFATYYCQTNYGTSSSNYGF |
| | | AFGQGTKVEIK |
| TSLP-140 | 1650 | DIQMTQSPSSLSASVGDRVTITCRASHNINSYLNWYQQKPGKAPKLLIYG |
| | | ASRLQRGVPSRFSGSGSGTDFTLTISSLQPEDFATYYCQQSYSTPTFGQGT |
| | | KVEIK |
| TSLP-141 | 1651 | DIQMTQSPSSLSASVGDRVTITCRASQSIRRYLNWYQQKPGKAPKLLIYG |
| | | NNNRPSGVPSRFSGSGSGTDFTLTISSLQPEDFATYYCQAWATNVVFGQG |
| | | TKVEIK |
| TSLP-142 | 1652 | DIQMTQSPSSLSASVGDRVTITCRASQSIRRYLNWYQQKPGKAPKLLIYH |
| | | TSRLQSGVPSRFSGSGSGTDFTLTISSLQPEDFATYYCSQSTHVPLTFGQG |
| | | TKVEIK |
| TSLP-143 | 1653 | DIQMTQSPSSLSASVGDRVTITCSGDKLGHTYTSWYQQKPGKAPKLLIYA |
| | | TSNLASGVPSRFSGSGSGTDFTLTISSLQPEDFATYYCRQGAASPRTFGQG |
| | | TKVEIK |
| TSLP-144 | 1654 | DIQMTQSPSSLSASVGDRVTITCSASQDINKYLNWYQQKPGKAPKLLIYR |
| | | KSNRPSGVPSRFSGSGSGTDFTLTISSLQPEDFATYYCNSFSPKPKPVVFG |
| | | QGTKVEIK |
| TSLP-145 | 1655 | DIQMTQSPSSLSASVGDRVTITCSGDKLGDKYAYWYQQKPGKAPKILIY |
| | | GASSRATGVPSRFSGSGSGTDFTLTISSLQPEDFATYYCASRSSKGNPHVL |
| | | FGQGTKVEIK |
| TSLP-146 | 1656 | DIQMTQSPSSLSASVGDRVTITCRASHNINSYLNWYQQKPGKAPKLLIYG |
| | | NNNRPSGVPSRFSGSGSGTDFTLTISSLQPEDFATYYCQQSYSNPLTFGQG |
| | | TKVEIK |
| TSLP-147 | 1657 | DIQMTQSPSSLSASVGDRVTITCSGDLRNKYASWYQQKPGKAPKLLIYG |
| | | ASSRATGVPSRFSGSGSGTDFTLTISSLQPEDFATYYCQQGPGTPNTFGQG |
| | | TKVEIK |
| TSLP-148 | 1658 | DIQMTQSPSSLSASVGDRVTITCSGDNLGDKYVHWYQQKPGKAPKLLIY |
| | | ATSTLQSGVPSRFSGSGSGTDFTLTISSLQPEDFATYYCGATDLSPWSIVF |
| | | GQGTKVEIK |
| TSLP-149 | 1659 | DIQMTQSPSSLSASVGDRVTITCRASHNINSYLNWYQQKPGKAPKLLIYG |
| | | KKNRPSGVPSRFSGSGSGTDFTLTISSLQPEDFATYYCATRAVRGNPHVL |
| | | FGQGTKVEIK |
| TSLP-150 | 1660 | DIQMTQSPSSLSASVGDRVTITCRASQYIGTALNWYQQKPGKAPKLLIYA |
| | | ASTLQRGVPSRFSGSGSGTDFTLTISSLQPEDFATYYCQQRSSFPLTFGQG |
| | | TKVEIK |
| TSLP-151 | 1661 | DIQMTQSPSSLSASVGDRVTITCRASQTIERRLNWYQQKPGKAPKLLIYG |
| | | NNNRPSGVPSRFSGSGSGTDFTLTISSLQPEDFATYYCQQTATWPFTFGQ |
| | | GTKVEIK |
| TSLP-152 | 1662 | DIQMTQSPSSLSASVGDRVTITCKSSQSLLYSNGKTLSWYQQKPGKAPKL |
| | | LIYETSKLASGVPSRFSGSGSGTDFTLTISSLQPEDFATYYCKQSYTLRTFG |
| | | QGTKVEIK |
| TSLP-153 | 1663 | DIQMTQSPSSLSASVGDRVTITCSGDKGHTYTSWYQQKPGKAPKLLIYHT |
| | | SRLQDGVPSRFSGSGSGTDFTLTISSLQPEDFATYYCQQYDAYPPTFGQG |
| | | TKVEIK |
| TSLP-154 | 1664 | DIQMTQSPSSLSASVGDRVTITCKASENVDTYVSWYQQKPGKAPKLLIY |
| | | GQHNRPSGVPSRFSGSGSGTDFTLTISSLQPEDFATYYCQQSYSTPRTFGQ |
| | | GTKVEIK |
| TSLP-155 | 1665 | DIQMTQSPSSLSASVGDRVTITCRASQSIVTYLNWYQQKPGKAPKLLIYG |
| | | TTSLESGVPSRFSGSGSGTDFTLTISSLQPEDFATYYCSQSTRVPPTFGQGT |
| | | KVEIK |
| TSLP-156 | 1666 | DIQMTQSPSSLSASVGDRVTITCRASQSISNNLNWYQQKPGKAPKLLIYR |
| | | KSNRPSGVPSRFSGSGSGTDFTLTISSLQPEDFATYYCSSRDKSGSRLVTF |
| | | GQGTKVEIK |
| TSLP-157 | 1667 | DIQMTQSPSSLSASVGDRVTITCRASQDVSSGVAWYQQKPGKAPKLLIY |
| | | DTSKVASGVPSRFSGSGSGTDFTLTISSLQPEDFETYYCQQSKEVPWTFG |
| | | QGTKVEIK |
| TSLP-158 | 1668 | DIQMTQSPSSLSASVGDRVTITCSGDNLGDKYVHWYQQKPGKAPKLLIY |
| | | ENNNRPSGVPSRFSGSGSGTDFTLTISSLOPEDFATYYCVARSVVGNPHV |
| | | LFGQGTKVEIK |
| TSLP-159 | 1669 | DIQMTQSPSSLSASVGDRVTITCTSSQSLFNVRSQKNYLAWYQQKPGKA |
| | | PKLLIYDASNLQSGVPSRFSGSGSGTDFTLTISSLQPEDFATYYCQQGHTL |
| | | PWTFGQGTKVEIK |
| TSLP-160 | 1670 | DIQMTQSPSSLSASVGDRVTITCKSSQSLLYSNGKTFLSWYQQKPGKAPK |
| | | LLIYQNDKRPSGVPSRFSGSGSGTDFTLTISSLQPEDFATYYCQQSTGHPQ |
| | | TFGQGTKVEIK |
| TSLP-161 | 1671 | DIQMTQSPSSLSASVGDRVTITCSGDKLGHTYTSWYQQKPGKAPKLLIYQ |
| | | NDKRPSGVPSRFSGSGSGTDFTLTISSLQPEDFATYYCQSYDKSNVVFGQ |
| | | GTKVEIK |
| TSLP-162 | 1672 | DIQMTQSPSSLSASVGDRVTITCRASQNIRSYLNWYQQKPGKAPKLLIYQ |
| | | NDKRPSGVPSRFSGSGSGTDFTLTISSLQPEDFATYYCQQGHTLPWTFGQ |
| | | GTKVEIK |
| TSLP-163 | 1673 | DIQMTQSPSSLSASVGDRVTITCRASQGVRTSLAWYQQKPGKAPKLMIY |
| | | GASNLHSGVPSRFSGSGSGTDFTLTISSLQPEDFATYYCSSRDRSGNHRVF |
| | | GQGTKVEIK |
| TSLP-164 | 1674 | DIQMTQSPSSLSASVGDRVTITCRASQSIRRYLNWYQQKPGKAPKLLIYE |
| | | DTKRPSGVPSRFSGSGSGTDFTLTISSLQPEDFATYYCQQSYSNPLTFGQG |
| | | TKVEIK |
| TSLP-165 | 1675 | DIQMTQSPSSLSASVGDRVTITCRASQSVDRYFNWYQQKPGKAPKLLIY |
| | | GASTLQSGVPSRFSGSGSGTDFTLTISSLQPEDFATYYCFQGSHIPYTFGQ |
| | | GTKVEIK |
| TSLP-166 | 1676 | DIQMTQSPSSLSASVGDRVTITCRASQSVDRYFNWYQQKPGKAPKLLIY |
| | | GNNNRPSGVPSRFSGSGSGTDFTLTISSLQPEDFATYYCATRAVRGNPHV |
| | | LFGQGTKVEIK |
| TSLP-167 | 1677 | DIQMTQSPSSLSASVGDRVTITCSGDLRNKYASWYQQKPGKAPKLLIYD |
| | | NNIRPSGVPSRFSGSGSGTDFTLTISSLQPEDFATYYCSQGTNVPPTFGQG |
| | | TKVEIK |
| TSLP-168 | 1678 | DIQMTQSPSSLSASVGDRVTITCRASQNIRSYLNWYQQKPGKAPKLLIYG |
| | | KNIRPSGVPSRFSGSGSGTDFTLTISSLQPEDFATYYCQQGRRLWSFGQGT |
| | | KVEIK |
| TSLP-169 | 1679 | DIQMTQSPSSLSASVGDRVTITCRASQSIRRYLNWYQQKPGKAPKLLIYG |
| | | NNNRPSGVPSRFSGSGSGTDFTLTISSLQPEDFATYYCSTRSSKGNPHVLF |
| | | GQGTKVEIK |
| TSLP-170 | 1680 | DIQMTQSPSSLSASVGDRVTITCSGDTLGGKYAWWYQQKPGKAPKLLIY |
| | | ATSNLASGVPSRFSGSGSGTDFTLTISSLQPEDFATYYCQQNLAPPYTFGQ |
| | | GTKVEIK |
| TSLP-171 | 1681 | DIQMTQSPSSLSASVGDRVTITCRASQSSRRYLNWYQQKPGKAPKLLIYH |
| | | TSRLHSGVPSRFSGSGSGTDFTLTISSLQPEDFATYYCSQGTHVPPTFGQG |
| | | TKVEIK |
| TSLP-172 | 1682 | DIQMTQSPSSLSASVGDRVTITCRASQTIERRLNWYQQKPGKAPKLLIYD |
| | | NIRPSGVPSRFSGSGSGTDFTLTISSLQPEDFATYYCQQYEKLPWTFGQGT |
| | | KVEIK |
| TSLP-173 | 1683 | DIQMTQSPSSLSASVGDRVTITCSGDALGSKFAHWYQQKPGKAPKLLIY |
| | | GQHNRPSGVPSRFSGSGSGTDFTLTISSLQPEDFATYYCSTRSRKGNPHVL |
| | | FGQGTKVEIK |
| TSLP-174 | 1684 | DIQMTQSPSSLSASVGDRVTITCSASSSVSYMYWYQQKPGKAPKLLIYGR |
| | | NKRPSGVPSRFSGSGSGTDFTLTISSLQPEDFATYYCQTWGPGIRVFGQGT |
| | | KVEIK |
| TSLP-175 | 1685 | DIQMTQSPSSLSASVGDRVTITCKSSQSLLYSNGKTLSWYQQKPGKAPKL |
| | | LIYETSKLASGVPSRFSGSGSGTDFTLTISSLQPEDFATYYCKQSYTLRTFG |
| | | QGTKVEIK |
| TSLP-176 | 1686 | DIQMTQSPSSLSASVGDRVTITCRASQTIGDYLNWYQQKPGKAPKLLIYG |
| | | RNKRPSGVPSRFSGSGSGTDFTLTISSLQPEDFATYYCQQGFSNPWTFGQ |
| | | GTKVEIK |
| TSLP-177 | 1687 | DIQMTQSPSSLSASVGDRVTITCRASQSISNNLNWYRQKPGKAPKLLIYR |
| | | ASQLQSGVPSRFSGSGSGTDFTLTISSLQPEDFATYYCSTRSSKGNPHVLF |
| | | GQGTKVEIK |
| TSLP-178 | 1688 | DIQMTQSPSSLSASVGDRVTITCQASQSISSYLAWYQQKPGKAPKLLIYG |
| | | RNKRPSGVPSRFSGSGSGTDFTLTISSLQPEDFATYYCAQGLRKPKTFGQ |
| | | GTKVEIK |
| TSLP-179 | 1689 | DIQMTQSPSSLSASVGDRVTITCKSSQSLLYSNGKTLSWYQQKPGKAPKL |
| | | LIYETSKLASGVPSRFSGSGSGTDFTLTISSLQPEDFATYYCQQGFSNPWT |
| | | FGQGTKVEIK |
| TSLP-180 | 1690 | DIQMTQSPSSLSASVGDRVTITCRASQSISNNLNWYQQKPGKAPKLLIYH |
| | | DNKRPSGVPSRFSGSGSGTDFTLTISSLQPEDFATYYCQPSFFFPYTFGQG |
| | | TKVEIK |
| TSLP-181 | 1691 | DIQMTQSPSSLSASVGDRVTITCSGHNLGDKFASWYQQKPGKAPKLLIY |
| | | AKNNRPSGVPSRFSGSGSGTDFTLTISSLQPEDFATYYCASRSSKGNPHVL |
| | | FGQGTKVEIK |
| TSLP-182 | 1692 | DIQMTQSPSSLSASVGDRVTITCRPNQNIATYINWYQQKPGKAPKLLIYH |
| | | DNKRPSGVPSRFSGSGSGTDFTLTISSLQPEDFATYYCMARSRKGNPHVL |
| | | FGQGTKVEIK |
| TSLP-183 | 1693 | DIQMTQSPSSLSASVGDRVTITCKASQHVITHVTWYQQKPGKAPKLLIYG |
| | | KNIRPSGVPSRFSGSGSGTDFTLTISSLQPEDFATYYCQQTATWPFTFGQG |
| | | TKVEIK |
| TSLP-184 | 1694 | DIQMTQSPSSLSASVGDRVTITCRASQSIRRYLNWYQQKPGKAPKLLIYG |
| | | KKNRPSGVPSRFSGSGSGTDFTLTISSLQPEDFATYYCAQTGTHPTTFGQG |
| | | TKVEIK |
| TSLP-185 | 1695 | DIQMTQSPSSLSASVGDRVTITCRASQSVDRYFNWYQQKPGKAPKLLIYR |
| | | ASTLASGVPSRFSGSGSGTDFTLTISSLQPEDFATYYCSSRDRSGNHRVFG |
| | | QGTKVEIK |
| TSLP-186 | 1696 | DIQMTQSPSSLSASVGDRVTITCRASQDVSSGVAWYQQKPGKAPKLLIYE |
| | | DTKRPSGVPSRFSGSGSGTDFTLTISSLQPEDFATYYCATRAVRGNPHVLF |
| | | GQGTKVEIK |
| TSLP-187 | 1697 | DIQMTQSPSSLSASVGDRVTITCRTSQSLSSYLHWYQQKPGKAPKLLIYG |
| | | SLRKGVPSRFSGSGSGTDFTLTISSLQPEDFATYYCSQSTRVPYTFGQGTK |
| | | VEIK |
| TSLP-188 | 1698 | DIQMTQSPSSLSASVGDRVTITCRASHNINSYLNWYQQKPGKAPKLLIYA |
| | | ASKLASGVPSRFSGSGSGTDFTLTISSLQPEDFATYYCQQDIKHPTFGQGT |
| | | KVEIK |
| TSLP-189 | 1699 | DIQMTQSPSSLSASVGDRVTITCRASQGVRTSLAWYQQKPGKAPKLLIYD |
| | | ASNLQSGVPSRFSGSGSGTDFTLTISSLQPEDFATYYCQQSYENPLTFGQG |
| | | TKVEIK |
| TSLP-190 | 1700 | DIQMTQSPSSLSASVGDRVTITCKASENVDTYVSWYQQKPGKAPKLLIY |
| | | QDNKWPSGVPSRFSGSGSGTDFTLTISSLQPEDFATYYCQQSYYSPYTFG |
| | | QGTKVEIK |
| TSLP-191 | 1701 | DIQMTQSPSSLSASVGDRVTITCSASSSVTYMHWYQQKPGKAPKLLIYQ |
| | | NDKRPSGVPSRFSGSGSGTDFTLTISSLQPEDFATYYCGQSYRYPLTFGQG |
| | | TKVEIK |
| TSLP-192 | 1702 | DIQMTQSPSSLSASVGDRVTITCSGDLGEKYVSWYQQKPGKAPKLLIYG |
| | | KKNRPSGVPSRFSGSGSGTDFTLTISSLQPEDFATYYCMSRSIWGNPHVLF |
| | | GQGTKVEIK |
| TSLP-193 | 1703 | DIQMTQSPSSLSASVGDRVTITCRANQNIGNFLNWYQQKPGKAPKLLIYG |
| | | KKNRPSGVPSRFSGSGSGTDFTLTISSLOPEDFATYYCQQSYSTPRTFGQG |
| | | TKVEIK |
| TSLP-194 | 1704 | DIQMTQSPSSLSASVGDRVTITCSGDLGEKYVSWYQQKPGKAPKLLIYG |
| | | ASRLQRGVPSRFSGSGSGTDFTLTISSLQPEDFATYYCASRSSKGNPHVLF |
| | | GQGTKVEIK |
| TSLP-195 | 1705 | DIQMTQSPSSLSASVGDRVTITCRASQSIRRYLNWYQQKPGKAPKLLIYA |
| | | NTNGPSGVPSRFSGSGSGTDFTLTISSLQPEDFATYYCQPSFVFPYTFGQG |
| | | TKVEIK |
| TSLP-196 | 1706 | DIQMTQSPSSLSASVGDRVTITCRASHNINSYLNWYQQKPGKAPKLLIYR |
| | | KSNRPSGVPSRFSGSGSGTDFTLTISSLQPEDFATYYCSSWAGSRSGTVFG |
| | | QGTKVEIK |
| TSLP-197 | 1707 | DIQMTQSPSSLSASVGDRVTITCRASQSIRRYLNWYQQKPGKAPKLLIYQ |
| | | ASSLQSGVPSRFSGSGSGTDFTLTISSLQPEDFATYYCQQSLRTPFTFGQG |
| | | TKVEIK |
| TSLP-198 | 1708 | DIQMTQSPSSLSASVGDRVTITCRATQSIRSFLNWYQQKPGKAPKLLIYE |
| | | NNNRPSGVPSRFSGSGSGTDFTLTISSLQPEDFATYYCSSWAGSRSGTVFG |
| | | QGTKVEIK |
| TSLP-199 | 1709 | DIQMTQSPSSLSASVGDRVTITCRASQSISSYVNWYQQKPGKAPKLLIYG |
| | | ASNLHSGVPSRFSGSGSGTDFTLTISSLQPEDFATYYCSQSTHVPPTFGQG |
| | | TKVEIK |
| TSLP-200 | 1710 | DIQMTQSPSSLSASVGDRVTITCRASQSISSYVNWYQQKPGKAPKLLIYD |
| | | ASSSQSGVPSRFSGSGSGTDFTLTISSLQPEDFATYYCNSRDTSGNHLVFG |
| | | QGTKVEIK |
| TSLP-201 | 1711 | DIQMTQSPSSLSASVGDRVTITCSGDLRNKYASWYQQKPGKAPKLLIYG |
| | | ASSRATGVPSRFSGSGSGTDFTLTISSLQPEDFATYYCSSRDRSGNHRVFG |
| | | QGTKVEIK |
| TSLP-202 | 1712 | DIQMTQSPSSLSASVGDRVTITCRASQSVRSYLNWYQQKPGKAPKLLIYR |
| | | ASQLQSGVPSRFSGSGSGTDFTLTISSLQPEDFATYYCFQGSHAPLTFGQG |
| | | TKVEIK |
| TSLP-203 | 1713 | DIQMTQSPSSLSASVGDRVTITCRASSSVSYMHWYQQKPGKAPKLLIYR |
| | | ASQLQSGVPSRFSGSGSGTDFTLTISSLQPEDFATYYCQQGYTLPWTFGQ |
| | | GTKVEIK |
| TSLP-204 | 1714 | DIQMTQSPSSLSASVGDRVTITCQASQSISSYLAWYQQKPGKAPKLLIYE |
| | | NNNRPSGVPSRFSGSGSGTDFTLTISSLQPEDFATYYCSQGTHVPPTFGQG |
| | | TKVEIK |
| TSLP-205 | 1715 | DIQMTQSPSSLSASVGDRVTITCQGGSPRSYYASWYQQKPGKAPKLLIYA |
| | | TSTLQSGVPSRFSGSGSGTDFTLTISSLQPEDFATYYCQQHYTTPPVFGQG |
| | | TKVEIK |
| TSLP-206 | 1716 | DIQMTQSPSSLSASVGDRVTITCTGDKLAEKYVSWYQQKPGKAPKLLIY |
| | | GKNIRPSGVPSRFSGSGSGTDFTLTISSLQPEDFATYYCAQGLRKPKTFGQ |
| | | GTKVEIK |
| TSLP-207 | 1717 | DIQMTQSPSSLSASVGDRVTITCRASHNINSYLNWYQQKPGKAPKLLIYP |
| | | KHNRPPGVPSRFSGSGSGTDFTLTISSLQPEDFATYYCQQWSSNPWTFGQ |
| | | GTKVEIK |
| TSLP-208 | 1718 | DIQMTQSPSSLSASVGDRVTITCRASQGVRTSLAWYQQKPGKAPKLLIYG |
| | | NNNRPSGVPSRFSGSGSGTDFTLTISSLQPEDFATYYCGATDLSPWSIVFG |
| | | QGTKVEIK |
| TSLP-209 | 1719 | DIQMTQSPSSLSASVGDRVTITCRASQTIERRLNWYQQKPGKAPKLLIYN |
| | | AKTLPEGVPSRFSGSGSGTDFTLTISSLQPEDFATYYCSQSTRVPYTFGQG |
| | | TKVEIK |
| TSLP-210 | 1720 | DIQMTQSPSSLSASVGDRVTITCSGDKLGHTYTSWYQQKPGKAPKLLIYK |
| | | VSNRFSGVPSRFSGSGSGTDFTLTISSLQPEDFATYYCAQTGTHPTTFGQG |
| | | TKVEIK |
| TSLP-211 | 1721 | DIQMTQSPSSLSASVGDRVTITCKASENVDTYVSWYQQKPGKAPKLLIYT |
| | | ASTLQSGVPSRFSGSGSGTDFTLTISSLQPEDFATYYCQHWHGHPHHGEH |
| | | NVFGQGTKVEIK |
| TSLP-212 | 1722 | DIQMTQSPSSLSASVGDRVTITCRASQTIGDYLNWYQQKPGKAPKLLIYH |
| | | DNKRPSGVPSRFSGSGSGTDFTLTISSLQPEDFATYYCQQGYRFPLTFGQG |
| | | TKVEIK |
| TSLP-213 | 1723 | DIQMTQSPSSLSASVGDRVTITCSASQDINKYLNWYQQKPGKAPKLLIYG |
| | | NNNRPSGVPSRFSGSGSGTDFTLTISSLQPEDFATYYCGSYTLTNTASVFG |
| | | QGTKVEIK |
| TSLP-214 | 1724 | DIQMTQSPSSLSASVGDRVTITCRASQRISSFLNWYQQKPGKAPKLLIYK |
| | | KRPSGVPSRFSGSGSGTDFTLTISSLQPEDFATYYCQGSYYSGSGWYYAF |
| | | GQGTKVEIK |
| TSLP-215 | 1725 | DIQMTQSPSSLSASVGDRVTITCRASQTISNYVNWYQQKPGKAPKLMIY |
| | | AASRLQSGVPSRFSGSGSGTDFTLTISSLQPEDFATYYCQQTHSTPRTFGG |
| | | GTKVEIK |
| TSLP-216 | 1726 | DIQMTQSPSSLSASVGDRVTITCRASQSIATYLHWYQQKPGKAPKLLIYA |
| | | ASRLQRGVPSRFSGSGSGTDFTLTISSLQPEDFATYYCQQSHSAPYTFGGG |
| | | TKVEIK |
| TSLP-217 | 1727 | DIQMTQSPSSLSASVGDRVTITCRASRSIGTYLNWYQQKPGKAPKLLIYA |
| | | ASTLRSGVPSRFSGSGSGTDFTLTISSLQPEDFATYYCQQNYNTPYTFGGG |
| | | TKVEIK |
| TSLP-218 | 1728 | DIQMTQSPSSLSASVGDRVTITCRASQSIRTYLNWYQQKPGKAPKLLIYG |
| | | ASRLQGGVPSRFSGSGSGTDFTLTISSLQPEDFATYYCQQTLPRTLWTFG |
| | | GGTKVEIK |
| TSLP-219 | 1729 | DIQMTQSPSSLSASVGDRVTITCRASQNINRYLNWYQQKPGKAPKLLIYA |
| | | TSNLQSGVPSRFSGSGSGTDFTLTISSLQPEDFATYYCRQSYSTPITFGGGT |
| | | KVEIK |
| TSLP-220 | 1730 | DIQMTQSPSSLSASVGDRVTITCRASQSIRSYLNWYQQKPGKAPKLLIYA |
| | | ASTLASGVPSRFSGSGSGTDFTLTISSLQPEDFATYYCQQTYRIPYTFGGG |
| | | TKVEIK |
| TSLP-221 | 1731 | DIQMTQSPSSLSASVGDRVTITCRASQSVSRYLNWYQQKPGKAPKLLIYG |
| | | ASTLQSGVPSRFSGSGSGTDFTLTISSLQPEDFATYYCQQGYSTPRTFGGG |
| | | TKVEIK |
| TSLP-222 | 1732 | DIQMTQSPSSLSASVGDRVTITCRSSQSISNYLNWYQQKPGKAPKLLSTL |
| | | QRGVPSRFSGSGSGTDFTLTISSLQPEDFATYYCQQGYSTPRTFGGGTKV |
| | | EIK |
| TSLP-223 | 1733 | DIQMTQSPSSLSASVGDRVTITCRASQSVITYLNWYQQKPGKAPKLLIYA |
| | | ASTLHSGVPSRFSGSGSGTDFTLTISSLQPEDFATYYCQQSYATPFTFGGG |
| | | TKVEIK |
| TSLP-224 | 1734 | DIQMTQSPSSLSASVGDRVTITCRASQNINKYLNWYQQKPGKAPKLLIYG |
| | | AASLQSGVPSRFSGSGSGTDFTLTISSLQPEDFATYYCQQTYSPPFTFGGG |
| | | TKVEIK |
| TSLP-225 | 1735 | DIQMTQSPSSLSASVGGRVTITCRASQGIATYLNWYQQKPGKAPKLLIYA |
| | | ASRLRSGVPSRFSGSGSGTDFTLTISSLQPEDFATYYCQQSYRTPPTFGGG |
| | | TKVEIK |
| TSLP-226 | 1736 | DIQMTQSPSSLSASVGDRVTITCRTSQSISTYLNWYQQKPGKAPKLLIYR |
| | | ASRLQSGVPSRFSGSGSGTDFTLTISSLQPEDFATYYCQQSSSTPYTFGGG |
| | | TKVEIK |
| TSLP-227 | 1737 | DIQMTQSPSSLSASVGDRVTITCRASQTISNYVNWYQQKPGKAPKLMIY |
| | | AASRLQSGVPSRFSGSGSGTDFTLTISSLQPEDFATYYCQQSYTSPWTFGG |
| | | GTKVEIK |
| TSLP-228 | 1738 | DIQMTQSPSSLSASVGDRVTITCRASQTIGRYLNWYQQKPGKAPKLLIYA |
| | | ASYLQSGVPSRFSGSGSGTDFTLTISSLRPEDFATYYCQQNYNTPYTFGG |
| | | GTKVEIK |
| TSLP-229 | 1739 | DIQMTQSPSSLSASVGDRVTITCRASQTISNYVNWYQQKPGKAPKLMIY |
| | | AASRLQSGVPSRFSGSGSGTDFTLTISSLQPEDFATYYCQQTHSTPRTFGG |
| | | GTKVEIK |
| TSLP-230 | 1740 | DIQMTQSPSSLSASVGDRVTITCRASQTISNYVNWYQQKPGKAPKLMIY |
| | | AASRLQSGVPSRFSGSGSGTDFTLTISSLQPEDFATYYCQQTHSTPRTFGG |
| | | GTKVEIK |
| TSLP-231 | 1741 | DIQMTQSPSSLSASVGDRVTITCRASQSISKYLSWYQQKPGKAPKLLIYG |
| | | ATTLQSGVPSRFSGSGSGTDFTLTISSLQPEDFATYYCQQSYSTPRFGGGT |
| | | KVEIK |
| TSLP-232 | 1742 | DIQMTQSPSSLSASVGDRVTITCRASQSIRRYLNWYQQKPGKAPKLLIYA |
| | | ASRLRSGVPSRFSGSGSGTDFTLTISSLQPEDFATYYCQQTDTSPWTFGGG |
| | | TKVEIK |
| TSLP-233 | 1743 | DIQMTQSPSSLSASVGDRVTITCRASQNINRYLNWYQQKPGKAPKLLIYA |
| | | TSNLQSGVPSRFSGSGSGTDFTLTISSLQPEDFATYYCRQSYSTPITFGGGT |
| | | KVEIK |
| TSLP-234 | 1744 | DIQMTQSPSSLSASVGDRVTITCRASQTISNYVNWYQQKPGKAPKLMIY |
| | | AASRLQSGVPSRFSGSGSGTDFTLTISSLQPEDFATYYCQQTHSTPRTFGG |
| | | GTKVEIK |
| TSLP-235 | 1745 | DIQMTQSPSSLSASVGDRVTITCRASQNIRSYLNWYQQKPGKAPKLLIYH |
| | | ASNLQSGVPSRFSGSGSGTDFTLTISSLQPEDFATYYCQQAYNTPWTFGG |
| | | GTKVEIK |
| TSLP-236 | 1746 | DIQMTQSPSSLSASVGDRVTITCRASQGISNYLNWYQQKPGKAPKLLIYA |
| | | ASGLQSGVPSRFSGSGSGTDFTLTISSLQPEDFATYYCQQSYTSPWTFGG |
| | | GTKVEIK |
| TSLP-237 | 1747 | DIQMTQSPSSLSASVGDRVTITCRASQTISNYVNWYQQKPGKAPKLMIY |
| | | AASRLQSGVPSRFSGSGSGTDFTLTISSLQPEDFATYYCQQTHSTPRTFGG |
| | | GTKVEIK |
| TSLP-238 | 1748 | DIQMTQSPSSLSASVGDRVTITCRASQTISNYVNWYQQKPGKAPKLMIY |
| | | AASRLQSGVPSRFSGSGSGTDFTLTISSLQPEDFATYYCQQTHSTPRTFGG |
| | | GTKVEIK |
| TSLP-239 | 1749 | DIQMTQSPSSLSASVGDRVTITCRASQTISNYVNWYQQKPGKAPKLMIY |
| | | AASRLQSGVPSRFSGSESGTDFTLTISSLQPEDFATYYCQQTSSSPLTFGG |
| | | GTKVEIK |
| TSLP-240 | 1750 | DIQMTQSPSSLSASVGDRVTITCRASQSISRYLNWYQQKPGKAPKLLIYA |
| | | SSTLQTGVPSRFSGSGSGTDFTLTISSLQPEDFATYYCQQTYITPFTFGGGT |
| | | KVEIK |
| TSLP-241 | 1751 | DIQMTQSPSSLSASVGDRVTITCRASQYIGNYLNWYQQKPGKAPKLLIYR |
| | | ASSLQSGVPSRFSGSGSGTDFTLTISSLQPEDFATYYCQQTLPRTLWTFGG |
| | | GTKVEIK |
| TSLP-242 | 1752 | DIQMTQSPSSLSASVGDRVTITCRASQTISNYVNWYQQKPGKAPKLMIY |
| | | AASRLQSGVPSRFSGSGSGTDFTLTISSLQPEDFATYYCQQTHSTPRTFGG |
| | | GTKVEIK |
| TSLP-243 | 1753 | DIQMTQSPSSLSASVGDRVTITCRTSQSISNRLNWYQQKPGKAPKLLIYG |
| | | ASTLQSGVPSRFSGSGSGTDFTLTISSLQPEDFATYYCQQGYSAPFTFGGG |
| | | TKVEIK |
| TSLP-244 | 1754 | DIQMTQSPSSLSASVGDRVTITCRASQNIGGYLNWYQQKPGKAPKLLIYA |
| | | SSRLQSGVPSRFSGSGSGTDFTLTISSLQPEDSATYYCQQSFTSPLTFGGGT |
| | | KVEIK |
| TSLP-245 | 1755 | DIQMTQSPSSLYASVGDRVTITCRASQNINKYLNWYQQKPGKAPKLLIYS |
| | | VSNLQSGVPSRFSGSGSGTDFTLTISSLQPEDFATYYCQQGYSSPLTFGGG |
| | | TKVEIK |
| TSLP-246 | 1756 | DIQMTQSPSSLSASVGDRVTITCRASQSVSSHLNWYQQKPGKAPKLLIYV |
| | | TSSLQSGVPSRFSGSGSGTDFTLTISSLQPEDFATYYCQQSHSTPTFGGGT |
| | | KVEIK |
| TSLP-247 | 1757 | DIQMTQSPSSLSASVGDRVTITCRASQUISRYLNWYQQKPGKAPKLLIYAT |
| | | SNLHSGVPSRFSGSGSGTDFTLTISSLQPEDFATYYCQQSYSGPRTFGGGT |
| | | KVEIK |
| TSLP-248 | 1758 | DIQMTQSPSSLSASVGDRVTITCRASQTISNYVNWYQQKPGKAPKLMIY |
| | | AASRLQSGVPSRFSGSGSGTDFTLTISSLQPEDFATYYCQQTHSTPRTFGG |
| | | GTKVEIK |
| TSLP-249 | 1759 | DIQMTQSPSSLSASVGDRVTITCRASQTISNYVNWYQQKPGKAPKLMIY |
| | | AASRLQSGVPSRFSGSGSGTDFTLTISSLQPEDFATYYCQQTHSTPRTFGG |
| | | GTKVEIK |
| TSLP-250 | 1760 | DIQMTQSPSSLSASVGDRVTITCRASQTISNYVNWYQQKPGKAPKLMIY |
| | | AASRLQSGVPSRFSGSGSGTDFTLTISSLQPEDFATYYCQQTHSTPRTFGG |
| | | GTKVEIK |
| TSLP-251 | 1761 | DIQMTQSPSSLSASVGDRVTITCRASQTISNYVNWYQQKPGKAPKLMIY |
| | | AASRLQSGVPSRFSGSGSGTDFTLTISSLQPEDFATYYCQQTHSTPRTFGG |
| | | GTKVEIK |
| TSLP-252 | 1762 | DIQMTQSPSSLSASVGDRVTITCRASQSITKYLNWYQQKPGKAPKLLIYG |
| | | ASRLQSGVPSRFSGSGSGTDFTLTISSLQPEDFATYYCQQSYKTPRTFGGG |
| | | TKVEIK |
| TSLP-253 | 1763 | DIQMTQSPSSLSASAGDRVTITCRASQGISRHLNWYQQKPGKAPKLLIYG |
| | | ASNLRSGVPSRFSGSGSGTDFTLTISSLQPEDFATYYCQQSYSSYTFGGGT |
| | | KVEIK |
| TSLP-254 | 1764 | DIQMTQSPSSLSASVGDRVTITCRASQSIRTYLNWYQQKPGKAPKLLIYA |
| | | ASRLRSGVPSRFSGSGSGTDFTLTISSLQPEDFATYYCQQGYSTPRSFGGG |
| | | TKVEIK |
| TSLP-255 | 1765 | DIQMTQSPSSLSASVGDRVTITCRASQTIITYLNWYQQKPGKAPKLLIYG |
| | | ASSLQTGVPSRFSGSGSGTDFTLTISSLQPEDFATYYCQQSYSLPWTFGGG |
| | | TKVEIK |
| TSLP-256 | 1766 | DIQMTQSPSSLSASVGDRVTITCRASQTISNYVNWYQQKPGKAPKLMIY |
| | | AASRLQSGVPSRFSGSGSGTDFTLTISSLQPEDFATYYCQQTHSTPRTFGG |
| | | GTKVEIK |
| TSLP-257 | 1767 | DIQMTQSPSSLSASVGDRVTITCRASQSIRHYLNWYQQKPGKAPKLLIYG |
| | | ASRLQSGVPSRFSGSGSGTDFTLTISSLQPEDFATYYCQQTLPRTLWTFGG |
| | | GTKVEIK |
| TSLP-258 | 1768 | DIQMTQSPSSLSASVGDRVTITCRASQSISSYLSWYQQKPGKAPKLLIYAA |
| | | SRSQSGVPSRFSGSGSGTDFTLTISSLQPEDFATYYCQQSYSTPQWTFGGG |
| | | TKVEIK |
| TSLP-259 | 1769 | DIQMTQSPSSLSASVGDHVTITCRASQSISTFVNWYQQKPGKAPKLLIYA |
| | | SSILQSGVPSRFSGSGSGTDFTLTISSLQPEDFATYYCQQSYSAPLTFGGGT |
| | | KVEIK |
| TSLP-260 | 1770 | DIQMTQSPSSLSASVGDRVTITCRASQTISNYVNWYQQKPGKAPKLMIY |
| | | AASRLQSGVPSRFSGSGSGTDFTLTISSLQPEDFATYYCQQTHSTPRTFGG |
| | | GTKVEIK |
| TSLP-261 | 1771 | DIQMTQSPSSLSASVGDRVTITCRASRSISRYLNWYQQKPGKAPKLLIYG |
| | | ASSLQSGVPSRFSGSGSGTDFTLTISSLQPEDFATYYCQQTYSTPLTFGGG |
| | | TKVEIK |
| TSLP-262 | 1772 | DIQMTQSPSSLSASVGDRVTITCRASQTISNYVNWYQQKPGKAPKLMIY |
| | | AASRLQSGVPSRFSGSGSGTDFTLTISSLQPEDFATYYCQQSYSNPRTFGG |
| | | GTKVEIK |
| TSLP-263 | 1773 | DIQMTQSPSSLSASVGDRVTITCRASQTISNYVNWYQQKPGKAPKLMIY |
| | | AASRLQSGVPSRFSGSGSGTDFTLTISSLQPEDFATYYCQQTHSTPRTFGG |
| | | GTKVEIK |
| TSLP-264 | 1774 | DIQMTQSPSSLSASVGDRVTITCRASQSVITYLNWYQQKPGKAPKLLIYA |
| | | ASTLHSGVPSRFSGSGSGTDFTLTISSLQPEDFATYYCQQSYATPFTFGGG |
| | | TKVEIK |
| TSLP-265 | 1775 | DIQMTQSPSSLSASVGDRVTITCRASQSVKTYLNWYQQKPGKAPKLLIY |
| | | AVSSLQSGVPSRFSGSGSGTDFTLTISSLQPEDFATYYCQQSYGSSWTFGG |
| | | GTKVEIK |
| TSLP-266 | 1776 | DIQMTQSPSSLSASVGDRVTITCRASQSVRNYLNWYQQKPGKAPKLLIY |
| | | GASKLQRGVPSRFSGSGSGTDFTLTISSLQPEDFATYYCQQSYRTPLTFGG |
| | | GTKVEIK |
| TSLP-267 | 1777 | DIQMTQSPSSLSASVGDRVTITCRASQSIGTFLNWYQQKPGKAPKLLIYG |
| | | ASGLYSGVPSRFSGSGSGTDFTLTISSLQPEDFATYYCQQSYGNPYTFGG |
| | | GTKVEIK |
| TSLP-268 | 1778 | DIQMTQSPSSLSASVGDRVTITCRASQTISNYVNWYQQKPGKAPKLMIY |
| | | AASRLQSGVPSRFSGSGSGTDFTLTISSLQPEDFATYYCQQTHSTPRTFGG |
| | | GTKVEIK |
| TSLP-269 | 1779 | DIQMTQSPSSLSASVGDRVTITCRASQSIGSNLNWYQQKPGKAPKLLIYG |
| | | ASSLKSGVPSRFSGSGSGTDFTLTISSLQPEDFATYYCQQTYSTPRSFGGG |
| | | TKVEIK |
| TSLP-270 | 1780 | DIQMTQSPSSLSASVGDRVTITCRAGQSIGSYLNWYQQKPGKAPKLLIYR |
| | | ASRLQSGVPSRFSGSGSGTDFTLTISSLQPEDFATYYCQQSYRTPWTFGG |
| | | GTKVEIK |
| TSLP-271 | 1781 | DIQMTQSPSSLSASVGDRVTITCRASQGISRHLNWYQQKPGKAPKLLIYA |
| | | ASRSQSGVPSRFSGSGSGTDFTLTISSLQPEDFATYYCQESYSAPYTFGGG |
| | | TKVEIK |
| TSLP-272 | 1782 | DIQMTQSPSSLSASVGDRVTITCRASQTISNYVNWYQQKPGKAPKLMIY |
| | | AASRLQSGVPSRFSGSGSGTDFTLTISSLQPEDFATYYCQQTHSTPRTFGG |
| | | GTKVEIK |
| TSLP-273 | 1783 | DIQMTQSPSSLSASVGDRVTITCRASQTISNYVNWYQQKPGKAPKLMIY |
| | | AASRLQSGVPSRFSGSGSGTDFTLTISSLQPEDFATYYCQQTHSTPRTFGG |
| | | GTKVEIK |
| TSLP-274 | 1784 | DIQMTQSPSSLSASVGDRVTITCRTSQSISTYLNWYQQKRKPLKLLIYGAS |
| | | KLQRGVPSRFSGSGSGTDFTLTISSLQPEDFATYYCQQSYTVPITFGGGTK |
| | | VEIK |
| TSLP-275 | 1785 | DIQMTQSPSSLSASVGDRVTITCRASQSIRDYLNWYQQKPGKAPKLLIYT |
| | | ASRLQSGVPSRFRGSGSGTDFTLTISSLQPEDFATYYCHQSYSTPLTFGGG |
| | | TKVEIK |
| TSLP-276 | 1786 | DIQMTQSPSSLSATVGDRVTITCRASQAISTYLNWYQQKPGKAPKLLIYA |
| | | ASTLHTGVPSRFSGSGSGTDFTLTISSLQPEDFATYYCQQSHSFPYTFGGG |
| | | TKVEIK |
| TSLP-277 | 1787 | DIQMTQSPSSLSASVGDRVTITCRASRSISTYLNWYQQKPGKAPKLLIYA |
| | | ASTLQNGVPSRFSGSGSGTDFTLTISSLQPEDFATYYCQQSHSFPWTFGG |
| | | GTKVEIK |
| TSLP-278 | 1788 | DIQMTQSPSSLSASVGDRVTITCRASQSITRYLNWYQQKPGKAPKLLIYA |
| | | ASRLQGGVPSRFSGSGSGTDFTLTISSLQPEDFATYYCQQSFRTPLTFGGG |
| | | TKVEIK |
| TSLP-279 | 1789 | DIQMTQSPSSLSASVGDRVTITCRASQTISNYVNWYQQKPGKAPKLMIY |
| | | AASRLQSGVPSRFSGSGSGTDFTLTISSLQPEDFATYYCQQTHSTPRTFGG |
| | | GTKVEIK |
| TSLP-280 | 1790 | DIQMTQSPSSLSASVGDRVTITCRASQTIRTYLNWYQQKPGKAPKLLIYF |
| | | ASTLQTGVPSRFSGSGSGTDFTLTISSLQPEDFATYYCQQTYNTPRTFGGG |
| | | TKVEIK |
| TSLP-281 | 1791 | DIQMTQSPSSLSASVGDRVTITCRASQNIGGYLNWYQQKPGKAPKLLIYV |
| | | ASSLESGVPSRFSGSGSGTDFTLTISSLQPEDFATYYCQQTYTTPFTFGGG |
| | | TKVEIK |
| TSLP-282 | 1792 | DIQMTQSPSSLSASVGDRVTITCRASQTIGNYLNWYQQKPGKAPKLLIYG |
| | | ASRLHSGVPSRFSGSGSGTDFTLTISSLQPEDFATYYCQQSHSAPLTFGGG |
| | | TKVEIK |
| TSLP-283 | 1793 | DIQMTQSPSSLSASVGDRVTITCRASQSVSRYLNWYQQKPGKAPKLLIYG |
| | | ASTLQSGVPSRFSGSGSGTDFTLTISSLQPEDFATYYCQQGYSTPRTFGGG |
| | | TKVEIK |
| TSLP-284 | 1794 | DIQMTQSPSSLSASVGDRVTITCRASQTISNYVNWYQQKPGKAPKLMIY |
| | | AASRLQSGVPSRFSGSGSGTDFTLTISSLQPEDFATYYCQQSYSSPITFGG |
| | | GTKVEIK |
| TSLP-285 | 1795 | DIQMTQSPSSLSASVGDRVTITCRASQTISNYVNWYQQKPGKAPKLMIY |
| | | AASRLQSGVPSRFSGSGSGTDFTLTISSLQPEDFATYYCQQTHSTPRTFGG |
| | | GTKVEIK |
| TSLP-286 | 1796 | DIQMTQSPSSLSASVGDRVTITCRASQTISNYVNWYQQKPGKAPKLMIY |
| | | AASRLQSGVPSRFSGSGSGTDFTLTISSLQPEDFATYYCQQTHSTPRTFGG |
| | | GTKVEIK |
| TSLP-287 | 1797 | DIQMTQSPSSLSASVGDRVTITCRASQTISNYVNWYQQKPGKAPKLMIY |
| | | AASRLQSGVPSRFSGSGSGTDFTLTISSLQPEDFATYYCQQTHSTPRTFGG |
| | | GTKVEIK |
| TSLP-288 | 1798 | DIQMTQSPSSLSASVGDRVTITCRASQTISNYVNWYQQKPGKAPKLMIY |
| | | AASRLQSGVPSRFSGSGSGTDFTLTISSLQPEDFATYYCQQAYSTPLTFGG |
| | | GTKVEIK |
| TSLP-289 | 1799 | DIQMTQSPSSLSASVGDRVTITCRASQSVSTLLNWYQQKPGKAPKLLIYA |
| | | ASSCNLGSHHASVAVDLGQISLSPSAVCNLKILQLTYCQQSYSFPYTFGG |
| | | GTKVEIK |
| TSLP-290 | 1800 | DIQMTQSPSSLSASVGDRVTITCRASQTISNYVNWYQQKPGKAPKLMIY |
| | | AASRLQSGVPSRFSGSGSGTDFTLTISSLQPEDFATYYCQQTHSTPRTFGG |
| | | GTKVEIK |
| TSLP-291 | 1801 | DIQMTQSPSSLSASVGDRVTITCRASQTISNYVNWYQQKPGKAPKLMIY |
| | | AASRLQSGVPSRFSGSGSGTDFTLTISSLQPEDFATYYCQQTHSTPRTFGG |
| | | GTKVEIK |
| TSLP-292 | 1802 | DIQMTQSPSSLSASVGDRVTITCRASQRISTYLNWYQQKPGKAPKLLIYA |
| | | ASTLYSGVPSRFSGSGSGTDFTLTISSLQPEDFATYYCQQSYTTWTFGGG |
| | | TKVEIK |
| TSLP-293 | 1803 | DIQMTQSPSSLSASVGDRVTITCRASQGISRHLNWYQQKPGKAPKLLIYK |
| | | ASSLHTGVPSRFSGSGSGTDFTLTISSPQPEDFATYYCQQTLPRTLWTFGG |
| | | GTKVEIK |
| TSLP-294 | 1804 | DIQMTQSPSSLSASVGDRVTITCRASQTISNYVNWYQQKPGKAPKLMIY |
| | | AASRLQSGVPSRFSGSGSGTDFTLTISSLQPEDFATYYCQQTHSTPRTFGG |
| | | GTKVEIK |
| TSLP-295 | 1805 | DIQMTQSPSSLSASVGDRVTITCRSSQSISNYLNWYQQKPGKAPKLLSTL |
| | | QRGVPSRFSGSGSGTDFTLTISSLQPEDFATYYCQQGYSTPRTFGGGTKV |
| | | EIK |
| TSLP-296 | 1806 | DIQMTQSPSSLSASVGDRVTITCRASQTISNYVNWYQQKPGKAPKLMIY |
| | | AASRLQSGVPSRFSGSGSGTDFTLTISSLQPEDFATYYCQQTHSTPRTFGG |
| | | GTKVEIK |
| TSLP-297 | 1807 | DIQMTQSPSSLSASVGDRVTITCRASQSIRTYLNWYQQKPGKAPKLLIYG |
| | | ASRLQGGVPSRFSGSGSGTDFTLTISSLQPEDFATYYCQQTLPRTLWTFG |
| | | GGTKVEIK |
| TSLP-298 | 1808 | DIQMTQSPSSLSASVGDRVTITCRASQTISNYVNWYQQKPGKAPKLMIY |
| | | AASRLQSGVPSRFSGSGSGTDFTLTISSLQPEDFATYYCQQTHSTPRTFGG |
| | | GTKVEIK |
| TSLP-299 | 1809 | DIQMTQSPSSLSASVGDRVTITCRASQTISTYLHWYQQKPGKAPKLLIYS |
| | | ASNLQTGVPSRFSGSGSGTDFTLTISSLQPEDFATYYCQQSYDTPRTFGGG |
| | | TKVEIK |
| TSLP-300 | 1810 | DIQMTQSPSSLSASVGDRVTITCRASQTISNYVNWYQQKPGKAPKLMIY |
| | | AASRLQSGVPSRFSGSGSGTDFTLTISSLQPEDFATYYCQQSYSTPPETFG |
| | | GGTKVEIK |
| TSLP-301 | 1811 | DIQMTQSPSSLSASVGDRVTITCRASQTISNYVNWYQQKPGKAPKLMIY |
| | | AASRLQSGVPSRFSGSGSGTDFTLTISSLQPEDFATYYCQQTHSTPRTFGG |
| | | GTKVEIK |

TABLE 13
IL1RL1 Variable Light Chain Domain Sequences

| IL1RL1 | SEQ ID | |
|---|---|---|
| Variant | NO | VL Sequence |
| IL1RL1- | 1812 | DIQMTQSPSSLSASVGDRVTITCKASDHIGKFLTWYQQKPGKAPKLLIYG |
| 189 | | RNKRPSGVPSRFSGSGSGTDFTLTISSLQPEDFATYYCQQSYSTPTFGQGT |
| | | KVEIK |
| IL1RL1- | 1813 | DIQMTQSPSSLSASVGDRVTITCRASQSIRRYLNWYQQKPGKAPKLLIYG |
| 190 | | NNNRPSGVPSRFSGSGSGTDFTLTISSLQPEDFATYYCSTRSRKGNPHVLF |
| | | GQGTKVEIK |
| IL1RL1- | 1814 | DIQMTQSPSSLSASVGDRVTITCKSSQSLLYSNGKTFLSWYQQKPGKAPK |
| 191 | | LLIYENNNRPSGVPSRFSGSGSGTDFTLTISSLQPEDFATYYCATRAVRGN |
| | | PHVLFGQGTKVEIK |
| IL1RL1- | 1815 | DIQMTQSPSSLSASVGDRVTITCQASQSISSYLAWYQQKPGKAPKLLIYG |
| 192 | | RNKRPSGVPSRFSGSGSGTDFTLTISSLQPEDFATYYCAQTGTHPTTFGQG |
| | | TKVEIK |
| IL1RL1- | 1816 | DIQMTQSPSSLSASVGDRVTITCKASDHIGKFLTWYQQKPGKAPKLLIYH |
| 193 | | TSRLQSGVPSRFSGSGSGTDFTLTISSLQPEDFATYYCQQGFSNPWTFGQG |
| | | TKVEIK |
| IL1RL1- | 1817 | DIQMTQSPSSLSASVGDRVTITCRASQSISSYVNWYQQKPGKAPKLLIYK |
| 194 | | KRPSGVPSRFSGSGSGTDFTLTINSLQPEDFATYYCATRAVRGNPHVLFG |
| | | QGTKVEIK |
| IL1RL1- | 1818 | DIQMTQSPSSLSASVGDRVTITCRPSQRISRYLNWYQQKPGKAPKLLIYQ |
| 195 | | NDKRPSGVPSRFSGSGSGTDFTLTISSLQPEDFATYYCSQNTHVPYTFGQ |
| | | GTKVEIK |
| IL1RL1- | 1819 | DIQMTQSPSSLSASVGDRVTITCRASSSVSYMHWYQQKPGKAPKLLIYG |
| 196 | | KKNRPSGVPSRFSGSGSGTDFTLTISSLQPEDFATYYCSQGTHVPPTFGQG |
| | | TKVEIK |
| IL1RL1- | 1820 | DIQMTQSPSSLSASVGDRVTITCKASENVDTYVSWYQQKPGKAPKLLIY |
| 197 | | GRNKRPSGVPSRFSGSGSGTDFTLTISSLQPEDFATYYCGQSYRYPLTFGQ |
| | | GTKVEIK |
| IL1RL1- | 1821 | DIQMTQSPSSLSASVGDRVTITCRASQSVRSYLNWYQQKPGKAPKLLIYG |
| 198 | | RNKRPSGVPSRFSGSGSGTDFTLTISSLQPEDFATYYCSARSVRGNPHVLF |
| | | GQGTKVEIK |
| IL1RL1- | 1822 | DIQMTQSPSSLSASVGDRVTITCSGDKLRNKYASWYQQKPGKAPKLLIY |
| 199 | | HTSRLQSGVPSRFSGSGSGTDFTLTISSLQPEDFATYYCTTRSNKGNPHVL |
| | | FGQGTKVEIK |
| IL1RL1- | 1823 | DIQMTQSPSSLSASVGDRVTITCSGDKLGHTYTSWYQQKPGKAPKLLIYR |
| 200 | | KSNRPSGVPSRFSGSGSGTDFTLTISSLQPEDFATYYCYSRDRSGNHLGM |
| | | FGQGTKVEIK |
| IL1RL1- | 1824 | DIQMTQSPSSLSASVGDRVTITCSGDKLRNKYASWYQQKPGKAPKLLIY |
| 201 | | GASSRATGVPSRFSGSGSGTDFTLTISSLOPEDFATYYCATRAVRGNPHV |
| | | LFGQGTKVEIK |
| IL1RL1- | 1825 | DIQMTQSPSSLSASVGDRVTITCSGDKLGHTYTSWYQQKPGKAPKLLIYH |
| 202 | | TSRLQSGVPSRFSGSGSGTDFTLTISSLQPEDFATYYCSARSVRGKPHVLF |
| | | GQGTKVEIK |
| IL1RL1- | 1826 | DIQMTQSPSSLSASVGDRVTITCRASQGVRTSLAWYQQKPGKAPKLLIYH |
| 203 | | TSRLHSGVPSRFSGSGSGTDFTLTISSLQPEDFATYYCFQGSHIPYTFGQGT |
| | | KVEIK |
| IL1RL1- | 1827 | DIQMTQSPSSLSASVGDRVTITCSGDTLGGKYAWWYQQKPGKAPKLLIY |
| 204 | | GKKNRPSGVPSRFSGSGSGTDFTLTISSLQPEDFATYYCSTRSSKGNPHVL |
| | | FGQGTKVEIK |
| IL1RL1- | 1828 | DIQMTQSPSSLSASVGDRVTITCRASQSIRRYLNWYQQKPGKAPKLLIYG |
| 205 | | ATILADGVPSRFSGSGSGTDFTLTISSLQPEDFATYYCSQNTHVPYTFGQG |
| | | TKVEIK |
| IL1RL1- | 1829 | DIQMTQSPSSLSASVGDRVTITCRPSQRISRYLNWYQQKPGKAPKLLIYR |
| 206 | | ASTLASGVPSRFSGSGSGTDFTLTISSLQPEDFATYYCQQSLRTPFTFGQG |
| | | TKVEIK |
| IL1RL1- | 1830 | DIQMTQSPSSLSASVGDRVTITCSASSSVSYMYWYQQKPGKAPKLLIYHD |
| 207 | | NKRPSGVPSRFSGSGSGTDFTLTISSLQPEDFATYYCATRAVRGNPHVLF |
| | | GQGTKVEIK |
| IL1RL1- | 1831 | DIQMTQSPSSLSASVGDRVTITCRASQDVSSGVAWYQQKPGKAPKLLIY |
| 208 | | GKKNRPSGVPSRFSGSGSGTDFTLTISSLQPEDFATYYCASRSSKGNPHVL |
| | | FGQGTKVEIK |
| IL1RL1- | 1832 | DIQMTQSPSSLSASVGDRVTITCRASQSVDRYFNWYQQKPGKAPKLLIY |
| 209 | | GKKNRPSGVPSRFSGSGSGTDFTLTISSLQPEDFATYYCASRSSKGNPHVL |
| | | FGQGTKVEIK |
| IL1RL1- | 1833 | DIQMTQSPSSLSASVGDRVTITCRASQSISGYLNWYQQKPGKAPKLLIYR |
| 210 | | KSNRPSGVPSRFSGSGSGTDFTLTISSLQPEDFATYYCQNGHSFPLTFGQG |
| | | TKVEIK |
| IL1RL1- | 1834 | DIQMTQSPSSLSASVGDRVTITCRASQSIRRYLNWYQQKPGKAPKLLIYD |
| 211 | | TSKVASGVPSRFSGSGSGTDFTLTISSLQPEDFATYYCQQSYSIPRTFGQG |
| | | TKVEIK |
| IL1RL1- | 1835 | DIQMTQSPSSLSASVGDRVTITCSGDRLGEKYVSWYQQKPGKAPKLLIY |
| 212 | | GASNLHSGVPSRFSGSGSGTDFTLTISSLQPEDFATYYCSTRSRKGNPHVL |
| | | FGQGTKVEIK |
| IL1RL1- | 1836 | DIQMTQSPSSLSASVGDRVTITCRASQSIREYLHWYQQKPGKAPKLLIYG |
| 213 | | ASSSATGVPSRFSGSGSGTDFTLTISSLQPEDFATYYCQQSYRTPWTFGQG |
| | | TKVEIK |
| IL1RL1- | 1837 | DIQMTQSPSSLSASVGDRVTITCKASENVDTYVSWYQQKPGKAPKLLIY |
| 214 | | GRNKRPSGVPSRFSGSGSGTDFTLTISSLQPEDFATYYCQQGHTLPWTFG |
| | | QGTKVEIK |
| IL1RL1- | 1838 | DIQMTQSPSSLSASVGDRVTITCSGDNLRGYYASWYQQKPGKAPKLLIY |
| 215 | | HTSRLQSGVPSRFSGSGSGTDFTLTISSLQPEDFATYYCSTRSRKGNPHVL |
| | | FGQGTEVEIK |
| IL1RL1- | 1839 | DIQMTQSPSSLSASVGDRVTITCRASQSIRRYLNWYQQKPGKAPKLLIYA |
| 216 | | TSTLQSGVPSRFSGSGSGTDFTLTISSLQPEDFATYYCQQSYSTPRTFGQG |
| | | TKVEIK |
| IL1RL1- | 1840 | DIQMTQSPSSLSASVGDRVTITCRASQTIERRLNWYQQKPGKAPKLLIYH |
| 217 | | TSRLHSGVPSRFSGSGSGTDFTLTISSLQPEDFATYYCQQSYSTPSFGQGT |
| | | KVEIK |
| IL1RL1- | 1841 | DIQMTQSPSSLSASVGDRVTITCSGDKLRNKYASWYQQKPGKAPKLLIY |
| 218 | | ENNNRPSGVPSRFSGSGSGTDFTLTISSLQPEDFATYYCASRSSKGNPHVL |
| | | FGQGTKVEIK |
| IL1RL1- | 1842 | DIQMTQSPSSLSASVGDRVTITCRTSQSLSSYLHWYQQKPGKAPKLLIYQ |
| 219 | | NDKRPSGVPSRFSGSGSGTDFTLTISSLQPEDFATYYCQQGNTLPYTFGQ |
| | | GTKVEIK |
| IL1RL1- | 1843 | DIQMTQSPSSLSASVGDRVTITCTSSQSLFNVRSQKNYLAWYQQKPGKA |
| 220 | | PKLLIYGASSRATGVPSRFSGSGSGTDFTLTISSLQPEDFATYYCNSRDTS |
| | | GNHIGVFGQGTKVEIK |
| IL1RL1- | 1844 | DIQMTQSPSSLSASVGDRVTITCRASQTIERRLNWYQQKPGKAPKLLIYG |
| 221 | | RNKRPSGVPSRFSGSGSGTDFTLTISSLQPEDFATYYCGQSYRYPLTFGQG |
| | | TKVEIK |
| IL1RL1- | 1845 | DIQMTQSPSSLSASVGDRVTITCRASQRISSFLNWYQQKPGKAPKLLIYG |
| 222 | | RNKRPSGVPSRFSGSGSGTDFTLTISSLQPEDFATYYCSSWAGSRSGTVFG |
| | | QGTKVEIK |
| IL1RL1- | 1846 | DIQMTQSPSSLSASVGDRVTITCSGDKLGDKYTSWYQQKPGKAPKLLIY |
| 223 | | GQHNRPSGVPSRFSGSGSGTDFTLTISSLQPEDFATYYCSTRSRKGNPHVL |
| | | FGQGTKVEIK |
| IL1RL1- | 1847 | DIQMTQSPSSLSASVGDRVTITCSGGSGSYGWYQQKPGKAPKLLIYGKNI |
| 224 | | RPSGVPSRFSGSGSGTDFTLTISSLQPEDFATYYCASRSSKGNPHVLFGQG |
| | | TKVEIK |
| IL1RL1- | 1848 | DIQMTQSPSSLSASVGDRVTITCSGDKLRNKYASWYQQKPGKAPKLLIY |
| 225 | | GNNNRPSGVPSRFSGSGSGTDFTLTISSLQPEDFATYYCQQSYKSPLTFGQ |
| | | GTKVEIK |
| IL1RL1- | 1849 | DIQMTQSPSSLSASVGDRVTITCRASQSISGYLNWYQQKPGKAPKLLIYQ |
| 226 | | NDKRPSGVPSRFSGSGSGTDFTLTISSLQPEDFATYYCQQGRRLWSFGQG |
| | | TKVEIK |
| IL1RL1- | 1850 | DIQMTQSPSSLSASVGDRVTITCKASDHIGKFLTWYQQKPGKAPKLLIYG |
| 227 | | ASTLQSGVPSRFSGSGSGTDFTLTISSLQPEDFATYYCQQSYNTPRTFGQG |
| | | TKVEIK |
| IL1RL1- | 1851 | DIQMTQSPSSLSASVGDRVTITCRASQGVRTSLAWYQQKPGKAPKLLIYP |
| 228 | | KHNRPPGVPSRFSGSGSGTDFTLTISSLQPEDFATYYCAQTGTHPTTFGQG |
| | | TKVEIK |
| IL1RL1- | 1852 | DIQMTQSPSSLSASVGDRVTITCRASQGVRTSLAWYQQKPGKAPKLLIYG |
| 229 | | KKNRPSGVPSRFSGSGSGTDFTLTISSLQPEDFATYYCGQSYRYPLTFGQG |
| | | TKVEIK |
| IL1RL1- | 1853 | DIQMTQSPSSLSASVGDRVTITCKASDHIGKFLTWYQQKPGKAPKLLIYG |
| 230 | | RNKRPSGVPSRFSGSGSGTDFTLTISSLQPEDFATYYCNSRDTSGLHYVFG |
| | | QGTKVEIK |
| IL1RL1- | 1854 | DIQMTQSPSSLSASVGDRVTITCRASQGVRTSLAWYQQKPGKAPKLLIYG |
| 231 | | RNKRPSGVPSRFSGSGSGTDFTLTISSLQPEDFATYYCSSWAGSRSGTVFG |
| | | QGTKVEIK |
| IL1RL1- | 1855 | DIQMTQSPSSLSASVGDRVTITCSGDKLRNKYASWYQQKPGKAPKLLIY |
| 232 | | GNNNRPSGVPSRFSGSGSGTDFTLTISSLQPEDFATYYCASRSSKGNPHVL |
| | | FGQGTKVEIK |
| IL1RL1- | 1856 | DIQMTQSPSSLSASVGDRVTITCSASSSVSSSYLHWYQQKPGKAPKLLIY |
| 233 | | KVSNRFSGVPSRFSGSGSGTDFTLTISSLQPEDFATYYCSTRSSKGNPHVL |
| | | FGQGTKVEIK |
| IL1RL1- | 1857 | DIQMTQSPSSLSASVGDRVTITCSGDKLRNKYASWYQQKPGKAPKLLIY |
| 234 | | GASSRATGVPSRFSGSGSGTDFTLTISSLQPEDFATYYCATRAVRGNPHV |
| | | LFGQGTKVEIK |
| IL1RL1- | 1858 | DIQMTQSPSSLSASVGDRVTITCRASQGVRTSLAWYQQKPGKAPKLLIYH |
| 235 | | DNKRPSGVPSRFSGSGSGTDFTLTISSLQPEDFATYYCATRAVRGNPHVL |
| | | FGQGTKVEIK |
| IL1RL1- | 1859 | DIQMTQSPSSLSASVGDRVTITCRASQSIRRYLNWYQQKPGKAPKLLIYA |
| 236 | | ASGLPSGVPSRFSGSGSGTDFTLTISSLQPEDFATYYCSSWAGSRSGTVFG |
| | | QGTKVEIK |
| IL1RL1- | 1860 | DIQMTQSPSSLSASVGDRVTITCRASQGVRTSLAWYQQKPGKAPKLLIYG |
| 237 | | RNKRPSGVPSRFSGSGSGTDFTLTISSLQPEDFATYYCGQSYRYPLTFGQG |
| | | TKVEIK |
| IL1RL1- | 1861 | DIQMTQSPSSLSASVGDRVTITCRTSQDIGNYLNWYQQKPGKAPKLLIYG |
| 238 | | KNIRPSGVPSRFSGSGSGTDFTLTISSLQPEDFATYYCSTRSRKGNPHVLF |
| | | GQGTKVEIK |
| IL1RL1- | 1862 | DIQMTQSPSSLSASVGDRVTITCSASSSVSSSYLHWYQQKPGKAPKLLIY |
| 239 | | RKSNRPSGVPSRFSGSGSGTDFTLTISSLQPEDFATYYCQQSYSTPTFGQG |
| | | TKVEIK |
| IL1RL1- | 1863 | DIQMTQSPSSLSASVGDRVTITCKASQHVITHVTWYQQKPGKAPKLLIYQ |
| 240 | | NDKRPSGVPSRFSGSGSGTDFTLTISSLQPEDFATYYCQQSYGTSWTFGQ |
| | | GTKVEIK |
| IL1RL1- | 1864 | DIQMTQSPSSLSASVGDRVTITCRASHNINSYLNWYQQKPGKAPKLLIYG |
| 241 | | KKNRPSGVPSRFSGSGSGTDFTLTISSLQPEDFATYYCQQSFSTPLTFGQG |
| | | TKVEIK |
| IL1RL1- | 1865 | DIQMTQSPSSLSASVGDRVTITCRASQNIRSYLNWYQQKPGKAPKLLIYG |
| 242 | | ASRLQRGVPSRFSGSGSGTDFTLTISSLQPEDFATYYCQQGDALPPTFGQ |
| | | GTKVEIK |
| IL1RL1- | 1866 | DIQMTQSPSSLSASVGDRVTITCRASQGVRTSLAWYQQKPGKAPKLLIYG |
| 243 | | RNKRPSGVPSRFSGSGSGTDFTLTISSLQPEDFATYYCQQSYSTPRTFGQG |
| | | TKVEIK |
| IL1RL1- | 1867 | DIQMTQSPSSLSASVGDRVTITCRASQGVRTSLAWYQQKPGKAPKLLIYR |
| 244 | | KSNRPSGVPSRFSGSGSGTDFTLTISSLQPEDFATYYCQQGFSNPWTFGQ |
| | | GTKVEIK |
| IL1RL1- | 1868 | DIQMTQSPSSLSASVGDRVTITCRASQGVRTSLAWYQQKPGKAPKLLIYR |
| 245 | | ASTLASGVPSRFSGSGSGTDFTLTISSLQPEDFATYYCASRSSKGNPHVLF |
| | | GQGTKVEIK |
| IL1RL1- | 1869 | DIQMTQSPSSLSASVGDRVTITCQSSQSVYSNNELSWYQQKPGKAPKLLI |
| 246 | | YGRNKRPSGVPSRFSGSGSGTDFTLTISSLQPEDFATYYCSQGTHVPPTFG |
| | | QGTKVEIK |
| IL1RL1- | 1870 | DIQMTQSPSSLSASVGDRVTITCRASQSISNNLNWYQQKPGKAPKLLIYR |
| 247 | | KSNRPSGVPSRFSGSGSGTDFTLTISSLQPEDFATYYCASRSSKGNPHVLF |
| | | GQGTKVEIK |
| IL1RL1- | 1871 | DIQMTQSPSSLSASVGDRVTITCRASQDIKNYLNWYQQKPGKAPKLLIYG |
| 248 | | RNKRPSGVPSRFSGSGSGTDFTLTISSLQPEDFATYYCQQDIKHPTFGQGT |
| | | KVEIK |
| IL1RL1- | 1872 | DIQMTQSPSSLSASVGDRVTITCRASHNINSYLNWYQQKPGKAPKLLIYG |
| 249 | | RNKRPSGVPSRFSGSGSGTDFTLTISSLQPEDFATYYCQQGHTLPWTFGQ |
| | | GTKVEIK |
| IL1RL1- | 1873 | DIQMTQSPSSLSASVGDRVTITCRASQSVDRYFNWYQQKPGKAPKLLIY |
| 250 | | GRNKRPSGVPSRFSGSGSGTDFTLTISSLQPEDFATYYCQQSYSFPLTFGQ |
| | | GTKVEIK |
| IL1RL1- | 1874 | DIQMTQSPSSLSASVGDRVTITCRASQNIRSYLNWYQQKPGKAPKLLIYA |
| 251 | | KNNRPSGVPSRFSGSGSGTDFTLTISSLQPEDFATYYCASRDRSGHGVFG |
| | | QGTKVEIK |
| IL1RL1- | 1875 | DIQMTQSPSSLSASVGDRVTITCRASQDVSSGVAWYQQKPGKAPKLLIYP |
| 252 | | KHNRPPGVPSRFSGSGSGTDFTLTISSLQPEDFATYYCSARSVRGNPHVLF |
| | | GQGTKVEIK |
| IL1RL1- | 1876 | DIQMTQSPSSLSASVGDRVTITCKASDHIGKFLTWYQQKPGKAPKLLIYG |
| 253 | | NNNRPSGVPSRFSGSGSGTDFTLTISSLQPEDFATYYCQTNYGTSSSNYGF |
| | | AFGQGTKVEIK |
| IL1RL1- | 1877 | DIQMTQSPSSLSASVGDRVTITCRASHNINSYLNWYQQKPGKAPKLLIYG |
| 254 | | TTSLESGVPSRFSGSGSGTDFTLTISSLQPEDFATYYCSTRSSKGNPHVLFG |
| | | QGTKVEIK |
| IL1RL1- | 1878 | DIQMTQSPSSLSASVGDRVTITCRASQDIYQNLDWYQQKPGKAPKLLIYQ |
| 255 | | MSHLASGVPSRFSGSGSGTDFTLTISSLQPEDFATYYCQQGKTLPLTFGQ |
| | | GTKVEIK |
| IL1RL1- | 1879 | DIQMTQSPSSLSASVGDRVTITCQGASLRNYYASWYQQKPGKAPKLLIY |
| 256 | | GNNNRPSGVPSRFSGSGSGTDFTLTISSLQPEDFATYYCASRSSKGNPHVL |
| | | FGQGTKVEIK |
| IL1RL1- | 1880 | DIQMTQSPSSLSASVGDRVTITCRASQSISGYLNWYQQKPGKAPKLLIYG |
| 257 | | NNNRPSGVPSRFSGSGSGTDFTLTISSLQPEDFATYYCSQNTHVPYTFGQ |
| | | GTKVEIK |
| IL1RL1- | 1881 | DIQMTQSPSSLSASVGDRVTITCRASQSVDRYFNWYQQKPGKAPKLLIY |
| 258 | | GASRLQRGVPSRFSGSGSGTDFTLTISSLQPEDFATYYCSSRSRHGNPHVL |
| | | FGQGTKVEIK |
| IL1RL1- | 1882 | DIQMTQSPSSLSASVGDRVTITCTSSQSLFNVRSQKNYLAWYQQKPGKA |
| 259 | | PKLLIYAASTLQRGVPSRFSGSGSGTDFTLTISSLQPEDFATYYCGGGYSSI |
| | | SDTTFGQGTKVGIK |
| IL1RL1- | 1883 | DIQMTQSPSSLSASVGDRVTITCRASENIYSNLAWYQQKPGKAPKLLIYK |
| 260 | | VSNRFSGVPSRFSGSGSGTDFTLTISSLQPEDFATYYCGQGVLWPATFGQ |
| | | GTKVEIK |
| IL1RL1- | 1884 | DIQMTQSPSSLSASVGDRVTITCSGDKLRNKYASWYQQKPGKAPKLLIY |
| 261 | | RKSNRPSGVPSRFSGSGSGTDFTLTISSLQPEDFATYYCQAWDTNTVVFG |
| | | QGTKVEIK |
| IL1RL1- | 1885 | DIQMTQSPSSLSASVGDRVTITCSGDRLGEKYVSWYQQKPGKAPKLLIYE |
| 262 | | NNNRPSGVPSRFSGSGSGTDFTLTISSLQPEDFATYYCVARAVRGNPHVL |
| | | FGQGTKVEIK |
| IL1RL1- | 1886 | DIQMTQSPSSLSASVGDRVTITCRASQGVRTSLAWYQQKPGKAPKLLIYA |
| 263 | | KNNRPSGVPSRFSGSGSGTDFTLTISSLQPEDFATYYCQQSYSSAPTFGQG |
| | | TKVEIK |
| IL1RL1- | 1887 | DIQMTQSPSSLSASVGDRVTITCSGDKLRNKYASWYQQKPGKAPKLLIY |
| 264 | | QNDKRPSGVPSRFSGSGSGTDFTLTISSLQPEDFATYYCSARSVRGNPHV |
| | | LFGQGTKVEIK |
| IL1RL1- | 1888 | DIQMTQSPSSLSASVGDRVTITCSGNKLGDKYASWYQQKPGKAPKLLIY |
| 265 | | GRNKRPSGVPSRFSGSGSGTDFTLTISSLQPEDFATYYCQQDLYPPYTFGQ |
| | | GTKVEIK |
| IL1RL1- | 1889 | DIQMTQSPSSLSASVGDRVTITCSASQDINKYLNWYQQKPGKAPKLLIYH |
| 266 | | TSRLHSGVPSRFSGSGSGTDFTLTISSLQPEDFATYYCQQGKTLPLTFGQG |
| | | TKVEIK |
| IL1RL1- | 1890 | DIQMTQSPSSLSASVGDRVTITCRTSQSLSSYLHWYQQKPGKAPKLLIYG |
| 267 | | KKNRPSGVPSRFSGSGSGTDFTLTISSLQPEDFATYYCQQGYRFPLTFGQG |
| | | TKVEIK |
| IL1RL1- | 1891 | DIQMTQSPSSLSASVGDRVTITCSGDKLRNKYASWYQQKPGKAPKLLIY |
| 268 | | GRNKRPSGVPSRFSGSGSGTDFTLTISSLQPEDFATYYCQQSYSFPRTFGQ |
| | | GTKVEIK |
| IL1RL1- | 1892 | DIQMTQSPSSLSASVGDRVTITCRASQSVDRYFNWYQQKPGKAPKLLIY |
| 269 | | GKNIRPSGVPSRFSGSGSGTDFTLTISSLQPEDFATYYCGQSYRYPLTFGQ |
| | | GTKVEIK |
| IL1RL1- | 1893 | DIQMTQSPSSLSASVGDRVTITCRASQPIGPDLLWYQQKPGKAPKLLIYG |
| 270 | | ASRLQRGVPSRFSGSGSGTDFTLTISSLQPEDFATYYCASRNGWNHVVFG |
| | | QGTKVEIK |
| IL1RL1- | 1894 | DIQMTQSPSSLSASVGDRVTITCRASQGVRTSLAWYQQKPGKAPKLLIYG |
| 271 | | KKNRPSGVPSRFSGSGSGTDFTLTISSLQPEDFATYYCSTRSRKGNPHVLF |
| | | GQGTKVEIK |
| IL1RL1- | 1895 | DIQMTQSPSSLSASVGDRVTITCSGDKLGHTYTSWYQQKPGKAPKLLIYR |
| 272 | | KSNRPSGVPSRFSGSGSGTDFTLTISSLQPEDFATYYCVARGTRGNPHVLF |
| | | GQGTKVEIK |
| IL1RL1- | 1896 | DIQMTQSPSSLSASVGDRVTITCRASQSISNNLNWYQQKPGKAPKLLIYR |
| 273 | | KSNRPSGVPSRFSGSGSGTDFTLTISSLQPEDFATYYCQQSNSWPYTFGQ |
| | | GTKVEIK |
| IL1RL1- | 1897 | DIQMTQSPSSLSASVGDRVTITCSGDNLRGYYASWYQQKPGKAPKLLIY |
| 274 | | GASRLQRGVPSRFSGSGSGTDFTLTISSLQPEDFATYYCMARSRKGNPHV |
| | | LFGQGTKVEIK |
| IL1RL1- | 1898 | DIQMTQSPSSLSASVGDRVTITCSGDKLRNKYASWYQQKPGKAPKLLIYP |
| 275 | | KHNRPPGVPSRFSGSGSGTDFTLTISSLQPEDFATYYCSTRSSKGNPHVLF |
| | | GQGTKVEIK |
| IL1RL1- | 1899 | DIQMTQSPSSLSASVGDRVTITCRTSQDISNYLNWYQQKPGKAPKLLIYG |
| 276 | | ASSRATGVPSRFSGSGSGTDFTLTISSLQPEDFATYYCQQSYSTPSFGQGT |
| | | KVEIK |
| IL1RL1- | 1900 | DIQMTQSPSSLSASVGDRVTITCQSSQSVYSNNELSWYQQKPGKAPKLLI |
| 277 | | YDASNLQSGVPSRFSGSGSGTDFTLTISSLQPEDFATYYCQSRATSGNPV |
| | | VFGQGTKVEIK |
| IL1RL1- | 1901 | DIQMTQSPSSLSASVGDRVTITCRTSQDISNYLNWYQQKPGKAPKLLIYD |
| 278 | | ASSLHTGVPSRFSGSGSGTDFTLTISSLQPEDFATYYCQQGYSLRNIDNAF |
| | | GQGTKVEIK |
| IL1RL1- | 1902 | DIQMTQSPSSLSASVGDRVTITCRPNQNIATYINWYQQKPGKAPKLLIYG |
| 279 | | KKNRPSGVPSRFSGSGSGTDFTLTISSLQPEDFATYYCQQGKTLPLTFGQG |
| | | TKVEIK |
| IL1RL1- | 1903 | DIQMTQSPSSLSASVGDRVTITCSASQDINKYLNWYQQKPGKAPKLLIYG |
| 280 | | QHNRPSGVPSRFSGSGSGTDFTLTISSLQPEDFATYYCQQSYSSAPTFGQG |
| | | TKVEIK |
| IL1RL1- | 1904 | DIQMTQSPSSLSASVGDRVTITCRASQSIRRYLNWYQQKPGKAPKLLIYA |
| 281 | | ASGLPSGVPSRFSGSGSGTDFTLTISSLQPEDFATYYCGQGVLWPATFGQ |
| | | GTKVEIK |
| IL1RL1- | 1905 | DIQMTQSPSSLSASVGDRVTITCKASDHIGKFLTWYQQKPGKAPKLLIYG |
| 282 | | RNKRPSGVPSRFSGSGSGTDFTLTISSLQPEDFATYYCQQSYSTPTFGQGT |
| | | KVEIK |
| IL1RL1- | 1906 | DIQMTQSPSSLSASVGDRVTITCKASDHIGKFLTWYQQKPGKAPKLLIYG |
| 283 | | RNKRPSGVPSRFSGSGSGTDFTLTISSLQPEDFATYYCQQTVVAPPLFGQG |
| | | TKVEIK |
| IL1RL1- | 1907 | DIQMTQSPSSLSASVGDRVTITCSASQDINKYLNWYQQKPGKAPKLLIYA |
| 284 | | ASTLQRGVPSRFSGSGSGTDFTLTISSLQPEDFATYYCQQSYIIPPTFGQGT |
| | | KVEIK |
| IL1RL1- | 1908 | DIQMTQSPSSLSASVGDRVTITCRTSQDISNYLNWYQQKPGKAPKLLIYA |
| 285 | | ASSLYSGVPSRFSGSGSGTDFTLTISSLQPEDFATYYCQQTFSIPLFGQGTK |
| | | VEIK |
| IL1RL1- | 1909 | DIQMTQSPSSLSASVGDRVTITCRTSQDISNYLNWYQQKPGKAPKLLIYG |
| 286 | | RNKRPSGVPSRFSGSGSGTDFTLTISSLQPEDFATYYCQQSFSVPAFGQGT |
| | | KVEIK |
| IL1RL1- | 1910 | DIQMTQSPSSLSASVGDRVTITCSGDLRNKYASWYQQKPGKAPKLLIYG |
| 287 | | ASTLQSGVPSRFSGSGSGTDFTLTISSLQPEDFATYYCAQGWGRPVTFGQ |
| | | GTKVEIK |
| IL1RL1- | 1911 | DIQMTQSPSSLSASVGDRVTITCRASQDIGNFLNWYQQKPGKAPKLLIYQ |
| 288 | | DFKRPSGVPSRFSGSGSGTDFTLTISSLQPEDFATYYCQQSYSTPTFGQGT |
| | | KVEIK |
| IL1RL1- | 1912 | DIQMTQSPSSLSASVGDRVTITCRASSSVSYMHWYQQKPGKAPKLLIYG |
| 289 | | KNIRPSGVPSRFSGSGSGTDFTLTISSLQPEDFATYYCSARSVRGNPHVLF |
| | | GQGTKVEIK |
| IL1RL1- | 1913 | DIQMTQSPSSLSASVGDRVTITCRASQGVRTSLAWYQQKPGKAPKLLIYH |
| 290 | | TSRLQDGVPSRFSGSGSGTDFTLTISSLQPEDFATYYCASRSSKGNPHVLF |
| | | GQGTKVEIK |
| IL1RL1- | 1914 | DIQMTQSPSSLSASVGDRVTITCSGDLGEKYVSWYQQKPGKAPKLLIYK |
| 291 | | VSNRFSGVPSRFSGSGSGTDFTLTISSLQPEDFATYYCSTRSSKGNPHVLF |
| | | GQGTKVEIK |
| IL1RL1- | 1915 | DIQMTQSPSSLSASVGDRVTITCRASSSVSYHWYQQKPGKAPKLLIYDTS |
| 292 | | KVASGVPSRFSGSGSGTDFTLTISSLQPEDFATYYCSQSTRVPPTFGQGTK |
| | | VEIK |
| IL1RL1- | 1916 | DIQMTQSPSSLSASVGDRVTITCSASSVSSSYLHWYQQKPGKAPKLLIYG |
| 293 | | ASNLHSGVPSRFSGSGSGTDFTLTISSLQPEDFATYYCQQSYSYPRTFGQG |
| | | TKVEIK |
| IL1RL1- | 1917 | DIQMTQSPSSLSASVGDRVTITCKASDHIGKFLTWYQQKPGKAPKLLIYG |
| 294 | | RNKRPSGVPSRFSGSGSGTDFTLTISSLQPEDFATYYCQQSYSTPTFGQGT |
| | | KVEIK |
| IL1RL1- | 1918 | DIQMTQSPSSLSASVGDRVTITCRASQSVRSYLNWYQQKPGKAPKLLIYG |
| 295 | | ASRLQRGVPSRFSGSGSGTDFTLTISSLQPEDFATYYCQQSYRTPLTFGQG |
| | | TKVEIK |
| IL1RL1- | 1919 | DIQMTQSPSSLSASVGDRVTITCRASQSIRRYLNWYQQKPGKAPKLLIYA |
| 296 | | KNNRPSGVPSRFSGSGSGTDFTLTISSLQPEDFATYYCQQGDALPPTFGQ |
| | | GTKVEIK |
| IL1RL1- | 1920 | DIQMTQSPSSLSASVGDRVTITCRASQRISSFLNWYQQKPGKAPKLLIYPK |
| 297 | | HNRPPGVPSRFSGSGSGTDFTLTISSLQPEDFATYYCQQSYETPLTFGQGT |
| | | KVEIK |
| IL1RL1- | 1921 | DIQMTQSPSSLSASVGDRVTITCSGDLRNKYASWYQQKPGKAPKLLIYQ |
| 298 | | NDKRPSGVPSRFSGSGSGTDFTLTISSLQPEDFATYYCATRAVRGNPHVL |
| | | FGQGTKVEIK |
| IL1RL1- | 1922 | DIQMTQSPSSLSASVGDRVTITCRASENIYSNLAWYQQKPGKAPKLLIYP |
| 299 | | KHNRPPGVPSRFSGSGSGTDFTLTISSLQPEDFATYYCVTRNRYGNPHVL |
| | | FGQGTKVEIK |
| IL1RL1- | 1923 | DIQMTQSPSSLSASVGDRVTITCRASQNIRSYLNWYQQKPGKAPKLLIYR |
| 300 | | KSNRPSGVPSRFSGSGSGTDFTLTISSLQPEDFATYYCQQGRRLWSFGQG |
| | | TKVEIK |
| IL1RL1- | 1924 | DIQMTQSPSSLSASVGDRVTITCKASDHIGKFLTWYQQKPGKAPKLLIYG |
| 301 | | RNKRPSGVPSRFSGSGSGTDFTLTISSLQPEDFATYYCQQSYSTPTFGQGT |
| | | KVEIK |
| IL1RL1- | 1925 | DIQMTQSPSSLSASVGDRVTITCRASQTISSYLNWYQQKPGKAPKLLIYR |
| 302 | | KSNRPSGVPSRFSGSGSGTDFTLTISSLQPEDFATYYCSQGTHVPPTFGQG |
| | | TKVEIK |
| IL1RL1- | 1926 | DIQMTQSPSSLSASVGDRVTITCRASQTIERRLNWYQQKPGKAPKLLIYG |
| 303 | | ENSRPSGVPSRFSGSGSGTDFTLTISSLQPEDFATYYCQQGYRWPVTFGQ |
| | | GTKVEIK |
| IL1RL1- | 1927 | DIQMTQSPSSLSASVGDRVTITCRASQSIVTYLNWYQQKPGKAPKLLIYG |
| 304 | | RNKRPSGVPSRFSGSGSGTDFTLTISSLQPEDFATYYCQQGYRWPVTFGQ |
| | | GTKVEIK |
| IL1RL1- | 1928 | DIQMTQSPSSLSASVGDRVTITCRASQGVRTSLAWYQQKPGKAPKLLIYH |
| 305 | | TSRLHSGVPSRFSGSGSGTDFTLTISSLQPEDFATYYCSQGTHVPPTFGQG |
| | | TKVEIK |
| IL1RL1- | 1929 | DIQMTQSPSSLSASVGDRVTITCKASDHIGKFLTWYQQKPGKAPKLLIYG |
| 306 | | RNKRPSGVPSRFSGSGSGTDFTLTISSLQPEDFATYYCQQSYSTPTFGQGT |
| | | KVEIK |
| IL1RL1- | 1930 | DIQMTQSPSSLSASVGDRVTITCRASQSIRRFLNWYQQKPGKAPKLLIYN |
| 307 | | TSRLQDGVPSRFSGSGSGTDFTLTISSLQPEDFATYYCASRSSKGNPHVLF |
| | | GQGTKVEIK |
| IL1RL1- | 1931 | DIQMTQSPSSLSASVGDRVTITCRTSQDISNYLNWYQQKPGKAPKLLIYA |
| 308 | | VTSRASGVPSRFSGSGSGTDFTLTISSLQPEDFATYYCQQSFSVPAFGQGT |
| | | KVEIK |
| IL1RL1- | 1932 | DIQMTQSPSSLSASVGDRVTITCKASDHIGKFLTWYQQKPGKAPKLLIYG |
| 309 | | RNKRPSGVPSRFSGSGSGTDFTLTISSLQPEDFATYYCQQSYSTPTFGQGT |
| | | KVEIK |
| IL1RL1- | 1933 | DIQMTQSPSSLSASVGDRVTITCRASQSISSYVNWYQQKPGKAPKLLIYG |
| 310 | | RNKRPSGVPSRFSGSGSGTDFTLTISSLQPEDFATYYCSTRSSKGNPHVLF |
| | | GQGTKVEIK |
| IL1RL1- | 1934 | DIQMTQSPSSLSASVGDRVTITCRASQDVSSGVAWYQQKPGKAPKLLIY |
| 311 | | AASTLQRGVPSRFSGSGSGTDFTLTISSLQPEDFATYYCSQSTRVPPTFGQ |
| | | GTKVEIK |
| IL1RL1- | 1935 | DIQMTQSPSSLSASVGDRVTITCSASSSVSYMYWYQQKPGKAPKLLIYGQ |
| 312 | | HNRPSGVPSRFSGSGSGTDFTLTISSLQPEDFATYYCQQGKTLPLTFGQGT |
| | | KVEIK |
| IL1RL1- | 1936 | DIQMTQSPSSLSASVGDRVTITCRASQTIERRLNWYQQKPGKAPKLLIYG |
| 313 | | RNKRPSGVPSRFSGSGSGTDFTLTISSLQPEDFATYYCSQSTRVPYTFGQG |
| | | TKVEIK |
| IL1RL1- | 1937 | DIQMTQSPSSLSASVGDRVTITCRASQSVDRYFNWYQQKPGKAPKLLIY |
| 314 | | GNNNRPSGVPSRFSGSGSGTDFTLTISSLQPEDFATYYCATRAVRGNPHV |
| | | LFGQGTKVEIK |
| IL1RL1- | 1938 | DIQMTQSPSSLSASVGDRVTITCSGDLRNKYASWYQQKPGKAPKLLIYG |
| 315 | | TSYRYSGVPSRFSGSGSGTDFTLTISSLQPEDFATYYCASRSSKGNPHVLF |
| | | GQGTKVEIK |
| IL1RL1- | 1939 | DIQMTQSPSSLSASVGDRVTITCRASQUIRRYLNWYQQKPGKAPKLLIYG |
| 316 | | QHNRPSGVPSRFSGSGSGTDFTLTISSLQPEDFATYYCSQSTRVPPTFGQG |
| | | TKVEIK |
| IL1RL1- | 1940 | DIQMTQSPSSLSASVGDRVTITCRASQTIERRLNWYQQKPGKAPKLLIYG |
| 317 | | RNKRPSGVPSRFSGSGSGTDFTLTISSLQPEDFATYYCSTRSRKGNPHVLF |
| | | GQGTKVEIK |
| IL1RL1- | 1941 | DIQMTQSPSSLSASVGDRVTITCKASDHIGKFLTWYQQKPGKAPKLLIYG |
| 318 | | RNKRPSGVPSRFSGSGSGTDFTLTISSLQPEDFATYYCQQSYSTPTFGQGT |
| | | KVEIK |
| IL1RL1- | 1942 | DIQMTQSPSSLSASVGDRVTITCRASQGVRTSLAWYQQKPGKAPKLLIYR |
| 319 | | ASTLASGVPSRFSGSGSGTDFTLTISSLQPEDFATYYCQQSYRPPLTFGQG |
| | | TKVEIK |
| IL1RL1- | 1943 | DIQMTQSPSSLSASVGDRVTITCKASDHIGKFLTWYQQKPGKAPKLLIYG |
| 320 | | RNKRPSGVPSRFSGSGSGTDFTLTISSLQPEDFATYYCQSYDLKSLNVVFG |
| | | QGTKVEIK |
| IL1RL1- | 1944 | DIQMTQSPSSLSASVGDRVTITCSASQDINKYLNWYQQKPGKAPKLLIYG |
| 321 | | ASRLQRGVPSRFSGSGSGTDFTLTISSLQPEDFATYYCQQGKTLPLTFGQG |
| | | TKVEIK |
| IL1RL1- | 1945 | DIQMTQSPSSLSASVGDRVTITCSGDNLGDKYVHWYQQKPGKAPKLLIY |
| 322 | | GKKNRPSGVPSRFSGSGSGTDFTLTISSLQPEDFATYYCSQSTHVPTFGQG |
| | | TKVEIK |
| IL1RL1- | 1946 | DIQMTQSPSSLSASVGDRVTITCRASQSIRRYLNWYQQKPGKAPKLLIYA |
| 323 | | ASGLPSGVPSRFSGSGSGTDFTLTISSLQPEDFATYYCQQSYSTPTFGQGT |
| | | KVEIK |
| IL1RL1- | 1947 | DIQMTQSPSSLSASVGDRVTITCTGDKLAEKYVSWYQQKPGKAPKLLIY |
| 324 | | AASTLQRGVPSRFSGSGSGTDFTLTISSLQPEDFATYYCGQSYRYPLTFGQ |
| | | GTKVEIK |
| IL1RL1- | 1948 | DIQMTQSPSSLSASVGDRVTITCRASQSISSYVNWYQQKPGKAPKLLIYQ |
| 325 | | TSRLHSGVPSRFSGSGSGTDFTLTISSLQPEDFATYYCAQGWGRPVTFGQ |
| | | GTKVEIK |
| IL1RL1- | 1949 | DIQMTQSPSSLSASVGDRVTITCSGGGSYGWYQQKPGKAPKLLIYGKNIR |
| 326 | | PSGVPSRFSGSGSGTDFTLTISSLQPEDFATYYCASRSSKGNPHVLFGQGT |
| | | KVEIK |
| IL1RL1- | 1950 | DIQMTQSPSSLSASVGDRVTITCKASDHIGKFLTWYQQKPGKAPKLLIYG |
| 327 | | RNKRPSGVPSRFSGSGSGTDFTLTISSLQPEDFATYYCQQSYSTPTFGQGT |
| | | KVEIK |
| IL1RL1- | 1951 | DIQMTQSPSSLSASVGDRVTITCRASQTIERRLNWYQQKPGKAPKLLIYE |
| 328 | | NNNRPSGVPSRFSGSGSGTDFTLTISSLQPEDFATYYCQQSYSAPTFGQGT |
| | | KVEIK |
| IL1RL1- | 1952 | DIQMTQSPSSLSASVGDRVTITCSGDLRNKYASWYQQKPGKAPKLLIYH |
| 329 | | TSRLHSGVPSRFSGSGSGTDFTLTISSLQPEDFATYYCNSRDTSGNHRVFG |
| | | QGTKVEIK |
| IL1RL1- | 1953 | DIQMTQSPSSLSASVGDRVTITCRASQTISSYLNWYQQKPGKAPKLLIYK |
| 330 | | KRPSGVPSRFSGSGSGTDFTLTISSLQPEDFATYYCOSTASGTVVFGQGTK |
| | | VEIK |
| IL1RL1- | 1954 | DIQMTQSPSSLSASVGDRVTITCKASDHIGKFLTWYQQKPGKAPKLLIYG |
| 331 | | RNKRPSGVPSRFSGSGSGTDFTLTISSLQPEDFATYYCQQSYSTPTFGQGT |
| | | KVEIK |
| IL1RL1- | 1955 | DIQMTQSPSSLSASVGDRVTITCRPNQNIATYINWYQQKPGKAPKLLIYG |
| 332 | | KKNRPSGVPSRFSGSGSGTDFTLTISSLQPEDFATYYCQQSYSTPTFGQGT |
| | | KVEIK |
| IL1RL1- | 1956 | DIQMTQSPSSLSASVGDRVTITCQGASLRNYYASWYQQKPGKAPKLLIY |
| 333 | | GKKNRPSGVPSRFSGSGSGTDFTLTISSLQPEDFATYYCATRAVRGNPHV |
| | | LFGQGTKVEIK |
| IL1RL1- | 1957 | DIQMTQSPSSLSASVGDRVTITCSGDLRNKYASWYQQKPGKAPKLLIYG |
| 334 | | RNKRPSGVPSRFSGSGSGTDFTLTISSLQPEDFATYYCQNGHSFPLTFGQG |
| | | TKVEIK |
| IL1RL1- | 1958 | DIQMTQSPSSLSASVGDRVTITCSGDKLGHTYTSWYQQKPGKAPKLLIYA |
| 335 | | TSNLASGVPSRFSGSGSGTDFTLTISSLQPEDFATYYCQQTYSIPYTFGQG |
| | | TKVEIK |
| IL1RL1- | 1959 | DIQMTQSPSSLSASVGDRVTITCSGDLGEKYVSWYQQKPGKAPKLLIYG |
| 336 | | RNKRPSGVPSRFSGSGSGTDFTLTISSLQPEDFATYYCQQSYSTPTFGQGT |
| | | KVEIK |
| IL1RL1- | 1960 | DIQMTQSPSSLSASVGDRVTITCKASDHIGKFLTWYQQKPGKAPKLLIYG |
| 337 | | RNKRPSGVPSRFSGSGSGTDFTLTISSLQPEDFATYYCQQSYSTPTFGQGT |
| | | KVEIK |
| IL1RL1- | 1961 | DIQMTQSPSSLSASVGDRVTITCRASQSVRSYLNWYQQKPGKAPKLLIYG |
| 338 | | QHNRPSGVPSRFSGSGSGTDFTLTISSLQPEDFATYYCQQGKTLPLTFGQG |
| | | TKVEIK |
| IL1RL1- | 1962 | DIQMTQSPSSLSASVGDRVTITCRASQSIRRYLNWYQQKPGKAPKLLIYD |
| 339 | | ASNLQSGVPSRFSGSGSGTDFTLTISSLQPEDFATYYCVTRNRYGNPHVL |
| | | FGQGTKVEIK |
| IL1RL1- | 1963 | DIQMTQSPSSLSASVGDRVTITCSASQDINKYLNWYQQKPGKAPKLLIYG |
| 340 | | RNKRPSGVPSRFSGSGSGTDFTLTISSLQPEDFATYYCQQSYSSAPTFGQG |
| | | TKVEIK |
| IL1RL1- | 1964 | DIQMTQSPSSLSASVGDRVTITCSGDNLRGYYASWYQQKPGKAPKLLIYP |
| 341 | | KHNRPPGVPSRFSGSGSGTDFTLTISSLQPEDFATYYCSTRSSKGNPHVLF |
| | | GQGTKVEIK |
| IL1RL1- | 1965 | DIQMTQSPSSLSASVGDRVTITCRASQSVDRYFNWYQQKPGKAPKLLIY |
| 342 | | GKNIRPSGVPSRFSGSGSGTDFTLTISSLQPEDFATYYCGQSYRYPLTFGQ |
| | | GTKVEIK |
| IL1RL1- | 1966 | DIQMTQSPSSLSASVGDRVTITCRASQSIRRYLNWYQQKPGKAPKLLIYD |
| 343 | | ASSSQSGVPSRFSGSGSGTDFTLTISSLQPEDFATYYCGQSYRYPLTFGQG |
| | | TKVEIK |
| IL1RL1- | 1967 | DIQMTQSPSSLSASVGDRVTITCRASQSISSYVNWYQQKPGKAPKLLIYG |
| 344 | | ASRLQRGVPSRFSGSGSGTDFTLTISSLQPEDFATYYCQQSYSFPRTFGQG |
| | | TKVEIK |
| IL1RL1- | 1968 | DIQMTQSPSSLSASVGDRVTITCKASDHIGKFLTWYQQKPGKAPKLLIYG |
| 345 | | RNKRPSGVPSRFSGSGSGTDFTLTISSLQPEDFATYYCQQSYSTPTFGQGT |
| | | KVEIK |
| IL1RL1- | 1969 | DIQMTQSPSSLSASVGDRVTITCQGASLRNYYASWYQQKPGKAPKLLIY |
| 346 | | AKNNRPSGVPSRFSGSGSGTDFTLTISSLQPEDFATYYCSTRSRKGNPHVL |
| | | FGQGTKVEIK |
| IL1RL1- | 1970 | DIQMTQSPSSLSASVGDRVTITCSGDLRNKYASWYQQKPGKAPKLLIYH |
| 347 | | TSRLHSGVPSRFSGSGSGTDFTLTISSLQPEDFATYYCYSRDRSGNHLGMF |
| | | GQGTKVEIK |
| IL1RL1- | 1971 | DIQMTQSPSSLSASVGDRVTITCSGDNLRGYYASWYQQKPGKAPKLLIY |
| 348 | | GKKNRPSGVPSRFSGSGSGTDFTLTISSLQPEDFATYYCSTRSRKGNPHVL |
| | | FGQGTKVEIK |
| IL1RL1- | 1972 | DIQMTQSPSSLSASVGDRVTITCKASDHIGKFLTWYQQKPGKAPKLLIYG |
| 349 | | RNKRPSGVPSRFSGSGSGTDFTLTISSLQPEDFATYYCQQSYSTPTFGQGT |
| | | KVEIK |
| IL1RL1- | 1973 | DIQMTQSPSSLSASVGDRVTITCSGNKLGDKYASWYQQKPGKAPKLLIY |
| 350 | | GKKNRPSGVPSRFSGSGSGTDFTLTISSLQPEDFATYYCSTRSSKGNPHVL |
| | | FGQGTKVEIK |
| IL1RL1- | 1974 | DIQMTQSPSSLSASVGDRVTITCRASQSIRRYLNWYQQKPGKAPKLLIYG |
| 351 | | KNIRPSGVPSRFSGSGSGTDFTLTISSLQPEDFATYYCAQGWGRPVTFGQ |
| | | GTKVEIK |
| IL1RL1- | 1975 | DIQMTQSPSSLSASVGDRVTITCRASQSISNNLNWYQQKPGKAPKLLIYH |
| 352 | | TSRLHSGVPSRFSGSGSGTDFTLTISSLQPEDFATYYCQQSYSTPSFGQGT |
| | | KVEIK |
| IL1RL1- | 1976 | DIQMTQSPSSLSASVGDRVTITCKASDHIGKFLTWYQQKPGKAPKLLIYG |
| 353 | | RNKRPSGVPSRFSGSGSGTDFTLTISSLQPEDFATYYCQQSYSTPTFGQGT |
| | | KVEIK |
| IL1RL1- | 1977 | DIQMTQSPSSLSASVGDRVTITCRASQSIRRYLNWYQQKPGKAPKLLIYQ |
| 354 | | NDKRPSGVPSRFSGSGSGTDFTLTISSLQPEDFATYYCQQSYRPPLTFGQG |
| | | TKVEIK |
| IL1RL1- | 1978 | DIQMTQSPSSLSASVGDRVTITCQASQSISSYLAWYQQKPGKAPKLLIYH |
| 355 | | DNKRPSGVPSRFSGSGSGTDFTLTISSLQPEDFATYYCMARSRKGNPHVL |
| | | FGQGTKVEIK |
| IL1RL1- | 1979 | DIQMTQSPSSLSASVGDRVTITCRASQSIRRYLNWYQQKPGKAPKLLIYG |
| 356 | | ASTLQSGVPSRFSGSGSGTDFTLTISSLQPEDFATYYCGQGVLWPATFGQ |
| | | GTKVEIK |
| IL1RL1- | 1980 | DIQMTQSPSSLSASVGDRVTITCRASHNINSYLNWYQQKPGKAPKLLIYG |
| 357 | | TTSLESGVPSRFSGSGSGTDFTLTISSLQPEDFATYYCSTRSSKGNPHVLFG |
| | | QGTKVEIK |
| IL1RL1- | 1981 | DIQMTQSPSSLSASVGDRVTITCSGDKLGHTYTSWYQQKPGKAPKLLIYK |
| 358 | | VSNRFSGVPSRFSGSGSGTDFTLTISSLQPEDFATYYCMARSRKGNPHVL |
| | | FGQGTKVEIK |
| IL1RL1- | 1982 | DIQMTQSPSSLSASVGDRVTITCKASDHIGKFLTWYQQKPGKAPKLLIYG |
| 359 | | RNKRPSGVPSRFSGSGSGTDFTLTISSLQPEDFATYYCQQSYSTPTFGQGT |
| | | KVEIK |
| IL1RL1- | 1983 | DIQMTQSPSSLSASVGDRVTITCSASSSVSYMYWYQQKPGKAPKLLIYGK |
| 360 | | KNRPSGVPSRFSGSGSGTDFTLTISSLQPEDFATYYCQTWGPGIRVFGQGT |
| | | KVEIK |
| IL1RL1- | 1984 | DIQMTQSPSSLSASVGDRVTITCRASQSISNNLNWYQQKPGKAPKLLIYG |
| 361 | | ASTLQSGVPSRFSGSGSGTDFTLTISSLQPEDFATYYCMARSRKGNPHVL |
| | | FGQGTKVEIK |
| IL1RL1- | 1985 | DIQMTQSPSSLSASVGDRVTITCKASDHIGKFLTWYQQKPGKAPKLLIYG |
| 362 | | RNKRPSGVPSRFSGSGSGTDFTLTISSLQPEDFATYYCQQSYSTPTFGQGT |
| | | KVEIK |
| IL1RL1- | 1986 | DIQMTQSPSSLSASVGDRVTITCRASQSVDRYFNWYQQKPGKAPKLLIY |
| 363 | | GQHNRPSGVPSRFSGSGSGTDFTLTINSLQPEDFATYYCAQGWGRPVTFG |
| | | QGTKVEIK |
| IL1RL1- | 1987 | DIQMTQSPSSLSASVGDRVTITCSGDLRNKYASWYQQKPGKAPKLLIYRT |
| 364 | | SWLQSGVPSRFSGSGSGTDFTLTISSLQPEDFATYYCSSRDKSGSRLVTFG |
| | | QGTKVEIK |
| IL1RL1- | 1988 | DIQMTQSPSSLSASVGDRVTITCSGDLRSYYVHWYQQKPGKAPKLLIYG |
| 365 | | KNIRPSGVPSRFSGSGSGTDFTLTISSLQPEDFATYYCQQSYRTPLTFGQG |
| | | TKVEIK |
| IL1RL1- | 1989 | DIQMTQSPSSLSASVGDRVTITCRASQSIRRYLNWYQQKPGKAPKLLIYG |
| 366 | | ASRLQRGVPSRFSGSGSGTDFTLTISSLQPEDFATYYCQQGPGTPNTFGQ |
| | | GTKVEIK |
| IL1RL1- | 1990 | DIQMTQSPSSLSASVGDRVTITCRPSQRISRYLNWYQQKPGKAPKLLIYQ |
| 367 | | DFKRPSGVPSRFSGSGSGTDFTLTISSLQPEDFATYYCQQGYRFPLTFGQG |
| | | TKVEIK |
| IL1RL1- | 1991 | DIQMTQSPSSLSASVGDRVTITCKASDHIGKFLTWYQQKPGKAPKLLIYG |
| 368 | | RNKRPSGVPSRFSGSGSGTDFTLTISSLQPEDFATYYCQQSYSTPTFGQGT |
| | | KVEIK |
| IL1RL1- | 1992 | DIQMTQSPSSLSASVGDRVTITCRASQGVRTSLAWYQQKPGKAPKLLIYH |
| 369 | | DNKRPSGVPSRFSGSGSGTDFTLTISSLQPEDFATYYCATRAVRGNPHVL |
| | | FGQGTKVEIK |
| IL1RL1- | 1993 | DIQMTQSPSSLSASVGDRVTITCRASQSILSYLNWYQQKPGKAPKLLIYG |
| 370 | | RNKRPSGVPSRFSGSGSGTDFTLTISSLQPEDFATYYCAQTGTHPTTFGQG |
| | | TKVEIK |
| IL1RL1- | 1994 | DIQMTQSPSSLSASVGDRVTITCRASQSIISYVNWYQQKPGKAPKLLIYG |
| 371 | | KKNRPSGVPSRFSGSGSGTDFTLTISSLQPEDFATYYCQQSYSAPTFGQGT |
| | | KVEIK |
| IL1RL1- | 1995 | DIQMTQSPSSLSASVGDRVTITCSASSSVSYMYWYQQKPGKAPKLLIYPK |
| 372 | | HNRPPGVPSRFSGSGSGTDFTLTISSLQPEDFATYYCSTRSSKGNPHVLFG |
| | | QGTKVEIK |
| IL1RL1- | 1996 | DIQMTQSPSSLSASVGDRVTITCRASQSISNNLNWYQQKPGKAPKLLIYG |
| 373 | | ASSRATGVPSRFSGSGSGTDFTLTISSLQPEDFATYYCMARSRKGNPHVL |
| | | FGQGTKVEIK |
| IL1RL1- | 1997 | DIQMTQSPSSLSASVGDRVTITCRASQSISSRLNWYQQKPGKAPKLLIYR |
| 374 | | ASSLQSGVPSRFSGSGSGTDFTLTISSLQPEDFATYYCQQTYSTPSSFGGG |
| | | TKVEIK |
| IL1RL1- | 1998 | DIQMTQSPSSLSASVGDRVTITCRASQSISRYLSWYQQKPGKAPKLLIYA |
| 375 | | GSKLQRGVPSRFSGSGSGTDFTLTISSLQPEDFATYYCQQTYSTPIAFGGG |
| | | TKVEIK |
| IL1RL1- | 1999 | DIQMTQSPSSLSASVGDRVTITCRASQSINNRLNWYQQKPGKAPKLLIYA |
| 376 | | TSRLQSGVPSRFSGSGSGTDFTLTISSLQPEDFATYYCQQTHRTPLTFGGG |
| | | TKVEIK |
| IL1RL1- | 2000 | DIQMTQSPSSLSASVGDRVTITCRASQNIGRYLNWYQQKPGKAPKLLIYG |
| 377 | | ASTLQRGVPSRFSGSGSGTDFTLTISSLQPEDFATYYCQQSYSAPTFGGGT |
| | | KVEIK |
| IL1RL1- | 2001 | DIQMTQSPSSLSASVGDRVTITCRASQSVRNYLNWYQQKPGKAPKRLIY |
| 378 | | AESSLQSGVPSRFSGSGSGTDFTLTISSLQPEDFATYYCQQSYRTPLTFGG |
| | | GTKVEIK |
| IL1RL1- | 2002 | DIQMTQSPSSLSASVGDRVTITCRASQNISTSLNWYQQKPGKAPKLLIYA |
| 379 | | ASALQTGVPSRFSGSGSGTDFTLTISSLQPEDFATYYCQQSYLTPITFGGG |
| | | TKVEIK |
| IL1RL1- | 2003 | DIQMTQSPSSLSASVGDRVTITCRTSQSISTYLNWYQQKPGKAPKLLIYA |
| 380 | | ASRLQNGVPSRFSGSGSGTDFTLTISSLQPEDFATYYCQQSYSVPGTFGG |
| | | GTKVEIK |
| IL1RL1- | 2004 | DIQMTQSPSSLSASVGDRVTITCRASHSISSHLNWYQQKPGKAPKLLIYG |
| 381 | | ASRLQRGVPSRFSGSGSGTDFTLTISSLQPEDFATYYCQQNYNTPFTFGG |
| | | GTKVEIK |
| IL1RL1- | 2005 | DIQMTQSPSSLSASVGDRVTITCRASQSIGSYLNWYQQKPGKAPKLLIYA |
| 382 | | SSTLQSRVPSRFSGSGSGTDFTLTISSLQPEDFATYYCQQSYSNPLTFGGG |
| | | TKVEIK |
| IL1RL1- | 2006 | DIQMTQSPSSLSASVGDRVTITCRASQNIPTYLNWYQQKPGKAPKLLIYA |
| 383 | | ASNLQSGVPSRFSGSGSGTDFTLTISSLQPEDFATYYCQQSYTTPPTFGGG |
| | | TKVEIK |
| IL1RL1- | 2007 | DIQMTQSPSSLSASVGDRVTITCRASQNILTYLNWYQQKPGKAPKLLIYA |
| 384 | | ASNLQSGVPSRFSGSGSGTDFTLTISSLQPEDFATYYCQQSYTTPPTFGGG |
| | | TKVEIK |
| IL1RL1- | 2008 | DIQMTQSPSSLSASVGDRVTITCRASQYISTFLNWYQQKPGKAPKLLIYA |
| 385 | | ASRLQDGVPSRFSGSGSGTDFTLTISSLQPEDFATYYCQQSYGSSWTFGG |
| | | GTKVEIK |
| IL1RL1- | 2009 | DIQMTQSPSSLSASVGDRVTITCRASQSITSSLNWYQQKPGKAPKLLIYG |
| 386 | | ASKLQRGVPSRFSGSGSGTDFTLTISSLQPEDFATYYCQQTYSPPWTFGG |
| | | GTKVEIK |
| IL1RL1- | 2010 | DIQMTQSPSSLSASVGDRVTITCRASQNIASYLNWYQQKPGKAPKLLIYG |
| 387 | | ASRLQSGVPSRFSGSGSGTDFTLTISSLQPEDFATYYCQQSSTPRTFGGGT |
| | | KVEIK |
| IL1RL1- | 2011 | DIQMTQSPSSLSASVGDRVTITCRTSQSIRKYLNWYQQKPGKAPKLLIYA |
| 388 | | SSRLQSGVPSRFSGSGSGTDFTLTISSLQPEDFATYYCQQNYRTPFTFGGG |
| | | TKVEIK |
| IL1RL1- | 2012 | DIQMTQSPSSLSASVGDRVTITCRASQNILTYLNWYQQKPGKAPKLLIYA |
| 389 | | ASNLQSGVPSRFSGSGSGTDFTLTISSLQPEDFATYYCQQSYTTPPTFGGG |
| | | TKVEIK |
| IL1RL1- | 2013 | DIQMTQSPSSLSASVGDRVTITCRSSQSISSYLNWYQQKPGKAPKLLIYGA |
| 390 | | SSLRSGVPSRFSGSGSGTDFTLTISSLQPEDFATYYCQQSYITPPTFGGGTK |
| | | VEIK |
| IL1RL1- | 2014 | DIQMTQSPSSLSASVGDRVTITCRASQSISTYLNWYQQKPGKAPKLLIYT |
| 391 | | ASRLQRGVPSRFSGSGSGTDFTLTISSLQPEDFATYYCQQSYKTPWTFGG |
| | | GTKVEIK |
| IL1RL1- | 2015 | DIQMTQSPSSLSASVGDRVTITCRASESISNFLNWYQQKPGKAPKLLIYG |
| 392 | | ASSLRSGVPSRFSGSGSGTDFTLPISSLQPENFATYYWQQNYRLPYTFGGS |
| | | TKGEIK |
| IL1RL1- | 2016 | DIQMTQSPSSLSASVGDRVTITCRASQRINTYLNWYQQKPGKAPKLLIYA |
| 393 | | ASRLRSGVPSRFSGSGSGTDFTLTISSLQPEDFATYYCQQSYSSLTFGGGT |
| | | KVEIK |
| IL1RL1- | 2017 | DIQMTQPPSSLSASVGDRVTITCRASQSISTYLSWYQQKPGKAPKLLIYG |
| 394 | | ASNLKSGVPSRFSGSGSGTDFTLTISSLQPEDFATYYCQQSYTPPLTFGGG |
| | | TKVEIK |
| IL1RL1- | 2018 | DIQMTQSPSSLSASVGDRVTITCRASQSVSNYLNWYQQKPGKAPKLLIYG |
| 395 | | ASKLQRGVPSRFSGSGSGTDFTLTISSLQPEDFATYYCQQSYKTPRTFGG |
| | | GTKVEIK |
| IL1RL1- | 2019 | DIQMTQSPSSLSASVGDRVTITCRASQTISKFLNWYQQKPGKAPKLLIYA |
| 396 | | TSRLQSGVPSRFSGSGSGTDFTLTISSLQPEDFATYYCQQSYSTRTFGGGT |
| | | KVEIK |
| IL1RL1- | 2020 | DIQMTQSPSSLSASVGDRVTITCRASESISNYLNWYQQKPGKAPKLLIYR |
| 397 | | ASRLQSGVPSRFSGSGSGTDFTLTISSLQPEDFATYYCQQTYITPWTFGGG |
| | | TKVEIK |
| IL1RL1- | 2021 | DIQMTQSPSSLSASVGDRVTITCRASQSISRYLSWYQQKPGKAPKLLIYA |
| 398 | | GSKLQRGVPSRFSGSGSGTDFTLTISSLQPEDFATYYCQQTYSTPPAFGGG |
| | | TKVEIK |
| IL1RL1- | 2022 | DIQMTQSPSSLSASVGDRVTITCRASRSISRYLNWYQQKPGKAPKLLIYG |
| 399 | | ASRLQSGVPSRFSGSGSGTDFTLTISSLQPEDFATYYCQQSYRTFGGGTK |
| | | VEIK |
| IL1RL1- | 2023 | DIQMTQSPSSLSASVGDRVTITCRASQSISRYLSWYQQKPGKAPKLLIYA |
| 400 | | GSKLQRGVPSRFSGSGSGTDFTLTISSLQPEDFATYYCQQTYSTPIAFGGG |
| | | TKVEIK |
| IL1RL1- | 2024 | DIQMTQSPSSLSASVGDRVTITCRASQTISYLNWYQQKPGKAPKLLIYGA |
| 401 | | STLQTGVPSRFSGSGSGTDFTLTISSLQPEDFATYYCQHRGTFGGGTKVEI |
| | | K |
| IL1RL1- | 2025 | DIQMTQSPSSLSASVGDRVTITCRTSQTISTYLNWYQQKPGKAPKLLIYG |
| 402 | | ASKLQRGVPSRFSGSGSGTDFTLTISSLQPEDFATYYCQQTYSSPLTFGGG |
| | | TKVEIK |
| IL1RL1- | 2026 | DIQMTQSPSSLSASVGDRVTITCRASQSVRSYLNWYQQKPGKAPKLLIYS |
| 403 | | ASRLQSGVPSRFSGSGSGTDFTLTISSLQPEDFATYYCQQSYSTPPAFGGG |
| | | TKVEIK |
| IL1RL1- | 2027 | DIQMTQSPSSLSASVGDRVTITCRASQTVSSFLNWYQQKPGKAPKLLIYG |
| 404 | | ASALQTGVPSRFSGSGSGTDFTLTISSLQPEDFATYYCQQSYSSITFGGGT |
| | | KVEIK |
| IL1RL1- | 2028 | DIQMTQSPSSLSASVGDRVTITCRASQSVSNYLNWYQQKPGKAPKLLIYG |
| 405 | | ASKLQRGVPSRFSGSGSGTDFTLTISSLQPEDFATYYCQQSYKTPRTFGG |
| | | GTKVEIK |
| IL1RL1- | 2029 | DIQMTQSPSSLSASVGDRVTITCRASQSISSNLNWYQQKPGKAPKLLIYG |
| 406 | | ASKLQRGVPSRFSGSGSGTDFTLTISSLQPEDFATYYCQRSYSTPRTFGGG |
| | | TKVEIK |
| IL1RL1- | 2030 | DIQMTQSPSSLSASVGDRVTITCRASQSISNKLNWYQQKPGKAPKLLIYA |
| 407 | | ASRLQRGVPSRFSGSGSGTDFTLTISSLQPEDFATYYCQQSYSTPNTFGGG |
| | | TKVEIK |
| IL1RL1- | 2031 | DIQMTQSPSSLSASVGDRVTITCRASQTVSSYLNWYQQKPGKAPKLLIYG |
| 408 | | ASKLQRGVPSRFSGSGSGTDFTLTISSLQPEDFATYYCQQSYKTPPTFGGG |
| | | TKVEIK |
| IL1RL1- | 2032 | DIQMTQSPSSLSASVGDRVTITCRASQSIIRYLNWYQQKPGKAPKLLIYG |
| 409 | | ASNLQRGVPSRFSGSGSGTDFTLTISSLQPEDFATYYCQQSYSLPTFGGGT |
| | | KVEIK |
| IL1RL1- | 2033 | DIQMTQSPSSLSASVGDRVTITCRASQTIGSSLNWYQQKPGKAPKLLIYG |
| 410 | | ASNLRSGVPSRFSGSGSGTDFTLTISSLQPEDFATYYCQQGYRTPLTFGGG |
| | | TKVEIK |
| IL1RL1- | 2034 | DIQMTQSPSSLSASVGDRVTITCRASQNIGGYLNWYQQKPGKAPKLLIYD |
| 411 | | ASTLQRGVPSRFSGSGSGTDFTLTISSLQPEDFATYYCQQRDTFGGGTKV |
| | | EIK |
| IL1RL1- | 2035 | DIQMTQSPSSLSASVGDRVTITCRASQSISRSLNWYQQKPGKAPKLLIYA |
| 412 | | ASRLRSGVPSRFSGSGSGTDFTLTISSLQPEDFATYYCQQSYATPRTFGGG |
| | | TKVEIK |
| IL1RL1- | 2036 | DIQMTQSPSSLSASVGDRVTITCRASQSISNLLHWYQQKPGKAPKLLIYR |
| 413 | | ASRLQSGVPSRFSGSGSGTDFTLTISSLQPEDFATYYCQQTYTTPFTFGGG |
| | | TKVEIK |
| IL1RL1- | 2037 | DIQMTQSPSSLSASVGDRVTITCRASQSISRYLSWYQQKPGKAPKLLIYA |
| 414 | | GSKLQRGVPSRFSGSGSGTDFTLTISSLQPEDFATYYCQQTYSTPIAFGGG |
| | | TKVEIK |
| IL1RL1- | 2038 | DIQMTQSPSSLSASVGDRVTITCRSSQTISNYLSWYQQKPGKAPKLLIYG |
| 415 | | AASLQSGVPSRFSGSGSGTDFTLTISSLQPEDFATYYCQQSYRTPPTFGGG |
| | | TKVEIK |
| IL1RL1- | 2039 | DIQMTQSPSSLSASVGDRVTITCRASQSISRYLSWYQQKPGKAPKLLIYA |
| 416 | | ASNLESGVPSRFSGSGSGTDFTLTISSLQPEDFATYYCQQSSSTPLTFGGG |
| | | TKVEIK |
| IL1RL1- | 2040 | DIQMTQSPSSLSASVGDRVTITCRASQNIGRYLNWYQQKPGKAPKLLIYA |
| 417 | | ASRLRSGVPSRFSGSGSGTDSTLTISSLQPEDFATYYCQQSFSLPPTFGGG |
| | | TKVEIK |
| IL1RL1- | 2041 | DIQMTQSPSSLSASVGDRVTITCRASRSISRYLNWYQQKPGKAPKLLIYG |
| 418 | | ASRLQSGVPSRFSGSGSGTDFTLTISSLQPEDFATYYCQQSFITPLTFGGGT |
| | | KVEIK |
| IL1RL1- | 2042 | DIQMTQSPSSLSASVGDRVTITCRASQSIGTYLNWYQQKPGKAPKLLIYA |
| 419 | | ASRLQGGVPSRFSGSGSGTDFTLTISSLQPEDFATYYCQQSHSTPRTFGGG |
| | | TKVEIK |
| IL1RL1- | 2043 | DIQMTQSPSSLSASVGDRVTITCRASQNINRYLNWYQQKPGKAPKLLIYD |
| 420 | | TSSLQSGVPSRFSGSGSGTDFTLTISSLQPEDFATYYCQQSYATPFTFGGG |
| | | TKVEIK |
| IL1RL1- | 2044 | DIQMTQSPSSLSASVGDRVTITCRASRSISRYLNWYQQKPGKAPKLLIYG |
| 421 | | ASSLQSGVPSRFSGSGSGTDFTLTISSLQPEDFATYYCQQTYRTPRTFGGG |
| | | TKVEIK |
| IL1RL1- | 2045 | DIQMTQSPSSLSASVGDRVTITCRASQSISRYLSWYQQKPGKAPKLLIYST |
| 422 | | STLQRGVPSRFSGSGSGTDFTLTISSLQPEDFTTYYCQHSYSTPNTFGGGT |
| | | KVEIK |
| IL1RL1- | 2046 | DIQMTQSPSSLSASVGDRVTITCRASQSIYNYLNWYQQKPGKAPKLLIYA |
| 423 | | ASRLQRGVPSRFSGSGSGTDFTLTISSLQPEDFATYYCQHSYSTPITFGGG |
| | | TKVEIK |
| IL1RL1- | 2047 | DIQMTQSPSSLSASVGDRVTITCRASQSISTYLNWYQQKPGKAPKLLIYR |
| 424 | | ASSLQSGVPSRFSGSGSGTDFTLTISSLQPEDFATYYCQQTYSTPLTFGGG |
| | | TKVEIK |
| IL1RL1- | 2048 | DIQMTQSPSSLSASVGDRVTITCRASQGISTYLNWYQQKPGKAPKLLIYA |
| 425 | | ASNLQRGVPSRFSGSGSGTDFTLTISSLQPEDFATYYCQQSYSSLLTFGGG |
| | | TKVEIK |
| IL1RL1- | 2049 | DIQMTQSPSSLSASVGDRVTITCRASQTISNYLNWYQQKPGKAPKLLIYG |
| 426 | | ASRSQSGVPSRFSGSGSGTDFTLTISSLQPEDFATYYCQQTYTPPWTFGGG |
| | | TKVEIK |
| IL1RL1- | 2050 | DIQMTQSPSSLSASVGDRVTITCRASQSISPYLNWYQQKPGKAPKLLIYA |
| 427 | | ASSLHDGVPSRFSGSGSGTDFTLTISSLQPEDFATYYCQQSYQLPPLTFGG |
| | | GTKVEIK |
| IL1RL1- | 2051 | DIQMTQSPSSLSASVGDRVTITCRASQSVSRYLNWYQQKPGKAPKLLIYA |
| 428 | | AYRLQSGVPSRFSGSGSGTDFTLTISSLQPEDSATYYCQQSFSIPHTFGGG |
| | | TKVEIK |
| IL1RL1- | 2052 | DIQMTQSPSSLSASVGDRVTITCRASRSISRYLNWYQQKPGKAPKLLIYA |
| 429 | | ASTLKSGVPSRFSGSGSGTDFTLTISSLQPEDFATYYCQQSYRTPPWTFGG |
| | | GTKVEIK |
| IL1RL1- | 2053 | DIQMTQSPSSLSASVGDRVTITCRARQSISSYLNWYQQKPGKAPKLLIYA |
| 430 | | ASVLQSGVPSRFSGSGSGTDFTLTISSLQPEDFATYYCQQSYSALTFGGGT |
| | | KVEIK |
| IL1RL1- | 2054 | DIQMTQSPSSLSASVGDRVTITCRASQSISTYLNWYQQKPGKAPKLLIYT |
| 431 | | ASRLQRGVPSRFSGSGSGTDFTLTISSLQPEDFATYYCQQSYKTPWTFGG |
| | | GTKVEIK |
| IL1RL1- | 2055 | RIQMTQSPSSLSASVGDRVTITCRASQSINTYLHWYQQKPGKAPKLLIYA |
| 432 | | TSSLRSGVPSRFSGSGSGTDFTLTISSLQPEDFATYYCQQIYNTPFTFGGGT |
| | | KVEIK |
| IL1RL1- | 2056 | DIQMTQSPSSLSASVGDRVTITCRASQSIRKYLNWYQQKPGKAPKLLIYA |
| 433 | | ASTLHGGVPSRFSGSGSGTDFTLTISSLQPEDFATYYCQQTLPRTLWTFG |
| | | GGTKVEIK |
| IL1RL1- | 2057 | DIQMTQSPSSLSASVGDRVTITCRASQSIRSYLNWYQQKPGKAPKLLIYG |
| 434 | | ASTLQRGVPSRFSGSGSGTDFTLTISSLQPEDFATYYCQQSYSPPRTFGGG |
| | | TKVEIK |
| IL1RL1- | 2058 | DIQMTQSPSSLSASVGDRVTITCRASQSISRYLSWYQQKPGKAPKLLIYA |
| 435 | | GSKLQRGVPSRFSGSGSGTDFTLTISSLQPEDFATYYCQQTYSTPIAFGGG |
| | | TKVEIK |
| IL1RL1- | 2059 | DIQMTQSPSSLSASVGDRVTITCRASQSISRYLSWYQQKPGKAPKLLIYA |
| 436 | | GSKLQRGVPSRFSGSGSGTDFTLTISSLQPEDFATYYCQQTYSTPIAFGGG |
| | | TKVEIK |
| IL1RL1- | 2060 | DIQMTQSPSSLSASVGDRVTITCRASQSISRHLNWYQQKPGKAPKLLIYA |
| 437 | | ASSLQSGVPSRFSGSGSGTDFTLTISSLQPEDFATYYCQQSYKTPVTFGGG |
| | | TKVEIK |
| IL1RL1- | 2061 | DIQMTQSPSSLSASVGDRVTITCRASQUISTSLNWYQQKPGKAPKLLIYAT |
| 438 | | SSLQNGVPSRFSGSGSGTDFTLTISSLQPEDFATYYCQQSYSKPYTFGGGT |
| | | KVEIK |
| IL1RL1- | 2062 | DIQMTQSPSSLSASVGDRVTITCRASQFISTYLNWYQQKPGKAPKLLIYS |
| 439 | | ASRLQSGVPSRFSGSGSGTDFTLTISSLQPEDFATYYCQQSYSGPRTFGGG |
| | | TKVEIK |
| IL1RL1- | 2063 | DIQMTQSPSSLSASVGDRVTITCRASQSIATYLNWYQQKPGKAPKLLIYG |
| 440 | | ASKLQRGVPSRFSGSGSGTDFTLTISSLQPEDFATYYCQQSYSTPTFGGGT |
| | | KVEIK |
| IL1RL1- | 2064 | DIQMTQSPSSLSASVGDRVTITCRASQYISTYLNWYQQKPGKAPKLLIYA |
| 441 | | ASHLQSGVPSRFSGSGSGTDFTLTISSLQPEDFATYYCQQTYSTPYTFGGG |
| | | TKVEIK |
| IL1RL1- | 2065 | DIQMTQSPSSLSASVGDRVTITCRASQSISSYVNWYQQKPGKAPKLLIYA |
| 442 | | ASNLQRGVPSRFSGSGSGTDFTLTISSLQPEDFATYYCQQSYRNPRTFGG |
| | | GTKVEIK |
| IL1RL1- | 2066 | DIQMTQSPSSLSASVGDRVTITCRTSQSISTYLNWYQQKPGKAPKLLIYG |
| 443 | | ASKLQRGVPSRFSGSGSGTDFTLTISSLQPEDFATYYCQQTYRTPITFGGG |
| | | TKVEIK |
| IL1RL1- | 2067 | DIQMTQSPSSLSASVGDRVTITCRAGQSIGNYLNWYQQKPGKAPKLLIYG |
| 444 | | ASRLRSGVPSRFSGSGSGTDFTLTISSLQPEDFATYYCQQSHSNPVTFGGG |
| | | TKVEIK |
| IL1RL1- | 2068 | DIQMTRSPSSLSASVGDRVTITCRASQSISRSLNWYQQKPGKAPKLLIYRA |
| 445 | | SRLQSGVPSRFSGSGSGTDFTLTISSLQPEDFATYYCQQSFSPPLTFGGGT |
| | | KVEIK |
| IL1RL1- | 2069 | DIQMTQSPSSLSASVGDRVTITCRASQTISRYLNWYQQKPGKAPKLLIYA |
| 446 | | ASSLSGGVPSRFSGSGSGTDFTLTISSLQPEDFATYYCQQSYTLPRTFGGG |
| | | TKVEIK |
| IL1RL1- | 2070 | DIQMTQSPSSLSASVGDRVTITCRASHSISRYLNWYQQKPGKAPKLLIYR |
| 447 | | ASNLQTGVPSRFSGSGSGTDFTLTISSLQPEDFATYYCQQAYSSPPTFGGG |
| | | TKVEIK |
| IL1RL1- | 2071 | DIQMTQSPSSLSASVGDRVTITCRASQSITRHLNWYQQKPGKAPKLLIYA |
| 448 | | ASRLQTGVPSRFSGSGSGTDFTLTISSLQPEDFATYYCQQTYGTPWTFGG |
| | | GTKVEIK |
| IL1RL1- | 2072 | DIQMTQSPSSLSASVGDRVTITCRASQGISSYLNWYQQKPGKAPKLLIYA |
| 449 | | TSNLQRGVPSRFSGSGSGTDFTLTISSLQPEDFATYYCQQSYKTPLTFGGG |
| | | TKVEIK |
| IL1RL1- | 2073 | DIQMTQSPSSLSASVGDRVTITCRASQSVSTSLNWYQQKPGKAPKLLIYA |
| 450 | | ASRLKSGVPSRFSGSGSGTDFTLTISSLQPEDFATYYCQQTFSTPFTFGGG |
| | | TKVEIK |
| IL1RL1- | 2074 | DIQMTQSPSSLSASVGDRVTITCRASQSIGSNLNWYQQKPGKAPKLLIYA |
| 451 | | ASRLHSGVPSRFSGSGSGTDFTLTISSLQPEDFATYYCQQSYRGPRTFGGG |
| | | TKVEIK |
| IL1RL1- | 2075 | DIQMTQSPSSLSASVGDRVTITCRASQSVRSYLNWYQQKPGKAPKLLIYS |
| 452 | | ASSLQTGVPSRFSGSGSGTDFTLTISSLQPEDFATYYCQQSYITPRTFGGG |
| | | TKVEIK |
| IL1RL1- | 2076 | DIQMTQSPSSLSASVGDRVTITCRASQSISRYLSWYQQKPGKAPKLLIYA |
| 453 | | GSKLQRGVPSRFSGSGSGTDFTLTISSLQPEDFATYYCQQTYSTPIAFGGG |
| | | TKVEIK |
| IL1RL1- | 2077 | DIQMTQSPSSLSASVGDRVTITCRASQSIGTYLHWYQQKPGKAPKLLIYG |
| 454 | | ASKLQRGVPSRFSGSGSGTDFTLTISSLQPEDFATYYCQQSYTAPYTFGG |
| | | GTKVEIK |
| IL1RL1- | 2078 | DIQMTQSPSSLSASVGDRVTITCRASQSISRHLNWYQQKPGKAPKLLIYR |
| 455 | | ASRLQSGVPSRFSGSGSGTDFTLTISGLQPEDFATYYCQQSYIPPLTFGGG |
| | | TKVEIK |
| IL1RL1- | 2079 | DIQMTQSPSSLSASVGDRVTITCRASQDIRTYLNWYQQKPGKAPKLLIYK |
| 456 | | ASSLQSGVPSRFSGSGSGTDFTLTISSLQPEDFATYYCQQSYSLPRTFGGG |
| | | TKVEIK |
| IL1RL1- | 2080 | DIQMTQSPSSLSASVGDRVTITCRASQSISRSLSWYQQKPGKAPKLLIYAA |
| 457 | | SSLASGVPSRFSGSGSGTDFTLTISSLQPEDFATYYCQQSYTPPRTFGGGT |
| | | KVEIK |
| IL1RL1- | 2081 | DIQMTQSPSSLSASVGDRVTITCRASQSIRSYLNWYQQKPGKAPKLLIYA |
| 458 | | ASTLASGVPSRFSGSGSGTDFTLTISSLQPEDFATYYCQQTYRIPYTFGGG |
| | | TKVEIK |
| IL1RL1- | 2082 | EIQMTQSPSSLSASVGDRVTITCRASQSISRYLNWYQQKPGKAPKLLIYA |
| 459 | | ASRLQRGVPSRFSGSGSGTDFTLTISSLQPEDFATYYCQQSYTTPRTFGGG |
| | | TKVEIK |
| IL1RL1- | 2083 | DIQMTQSPSSLSASVGDRVTITCRASQTISKFLNWYQQKPGKAPKLLIYE |
| 460 | | ASSLQSGVPSRFSGSGSGTDFTLTISSLQPEDFATYYCQQTYRTPLTFGGG |
| | | TKVEIK |
| IL1RL1- | 2084 | DIQMTQSPSSLSASVGDRVTITCRPSQSISTYLNWYQQKPGKAPKLLIYG |
| 461 | | ASSLHSGVPSRFSGSGSGTDFTLTISSLQPEDFATYYCHQTYSTPRTFGGG |
| | | TKVEIK |
| IL1RL1- | 2085 | DIQMTQSPSSLSASVGDRVTITCRASQSISRYLSWYQQKPGKAPKLLIYA |
| 462 | | GSKLQRGVPSRFSGSGSGTDFTLTISSLQPEDFATYYCQQTYSTPIAFGGG |
| | | TKVEIK |
| IL1RL1- | 2086 | DIQMTQSPSSLSASVGDRVTITCRASQSIRDYLNWYQQKPGKAPKLLIYG |
| 463 | | ASRLHSGVPSRFSGSGSGTDFTLTISSLQPEDFATYYCQQTYGTPRTFGGG |
| | | TKVEIK |
| IL1RL1- | 2087 | DIQMTQSPSSLSASVGDRVTITCRGSQSISSYLNWYQQKPGKAPKLLIYT |
| 464 | | ASALQSGVPSRFSGSGSGTDFTLTISSLQPEDFATYYCQQSYSNPVTFGGG |
| | | TKAEIK |
| IL1RL1- | 2088 | DIQMTQSPSSLSASVGDRVTITCRASQTISTYLNWYQQKPGKAPKLLIYG |
| 465 | | TSSLQSGVPSRFSGSGSGTDFTLTISSLQPEDFATYYCQQSFSIPLTFGGGT |
| | | KVEIK |
| IL1RL1- | 2089 | DIQMTQSPSSLSASVGDRVTITCRASQTVSSYLNWYQQKPGKAPKLLIYR |
| 466 | | ASRLQSGVPSRFSGSGSGTDFTLTISSLQPEDFATYYCQQSYTNPRTFGGG |
| | | TKVEIK |
| IL1RL1- | 2090 | DIQMTQSPSSLSASVGDRVTITCRASQSISRYLSWYQQKPGKAPKLLIYA |
| 467 | | GSKLQRGVPSRFSGSGSGTDFTLTISSLQPEDFATYYCQQTYSTPIAFGGG |
| | | TKVEIK |
| IL1RL1- | 2091 | DIQMTQSPSSLSASVGDRVTITCRASQSISRYLNWYQQKPGKAPKLLIYA |
| 468 | | ASKLQRGVPSRFSGSGSGTDFTLTISSLQPEDFATYYCQQSYRGPRTFGG |
| | | GTKVEIK |
| IL1RL1- | 2092 | DIQMTQSPSSLSASVGDRVTITCRASQSISRYLSWYQQKPGKAPKLLIYA |
| 469 | | GSKLQRGVPSRFSGSGSGTDFTLTISSLQPEDFATYYCQQTYSTPIAFGGG |
| | | TKVEIK |
| IL1RL1- | 2093 | DIQMTQSPSSLSASVGDRVTITCRASQSISRYLSWYQQKPGKAPKLLIYA |
| 470 | | GSKLQRGVPSRFSGSGSGTDFTLTISSLQPEDFATYYCQQTYSTPIAFGGG |
| | | TKVEIK |
| IL1RL1- | 2094 | DIQMTQSPSSLSASVGDRVTITCRASQSISRYLSWYQQKPGKAPKLLIYA |
| 471 | | ASSLESGVPSRFSGSGSGTDFTLTISSLQPEDFATYYCQQSYTLPYTFGGG |
| | | TKVEIK |
| IL1RL1- | 2095 | DIQMTQSPSSLSASVGDRVTITCRASQTISSYLHWYQQKPGKAPKLLIYG |
| 472 | | ASSLQAGVPSRFSGSGSGTDFTLTISSLQPEDFATYYCLQSYSSPRTFGGG |
| | | TKVEIK |
| IL1RL1- | 2096 | DIQMTQSPSSLSASVGDRVTITCRASQSVSNYLNWYQQKPGKAPKLLIYG |
| 473 | | ASKLQRGVPSRFSGSGSGTDFTLTISSLQPEDFATYYCQQSYKTPRTFGG |
| | | GTKVEIK |
| IL1RL1- | 2097 | DIQMTQSPSSLSASVGDRVTITCRASQSIGTNLNWYQQKPGKAPKLLIYG |
| 474 | | ASSLYAGVPSRFSGSGSGTDFTLTISSLQPEDFATYYCQQTYSSPVTFGGG |
| | | TKVEIK |
| IL1RL1- | 2098 | DIQMTQSPSSLSASVGDRVTITCRASQUISRYLNWYQQKPGKAPKLLIYA |
| 475 | | ASNLQNGVPSRFSGSGSGTDFTLTISSLQPEDFATYYCQQSYSSPTFGGGT |
| | | KVEIK |
| IL1RL1- | 2099 | DIQMTQSPSSLSASVGDRVTITCRASQNIRRYLNWYQQKPGKAPKLLIYS |
| 476 | | ASSLQRGVPSRFSGSGSGTDFTLTISSLQPEDFATYYCQQSYSGPRTFGGG |
| | | TKVEIK |
| IL1RL1- | 2100 | DIQMTQSPSSLSASVGDRVTITCRAGQSIATYLNWYQQKPGKAPKLLIYR |
| 477 | | ASRLQSGVPSRFSGSGSGTDFTLTISSLQPEDFATYYCQQSYSYPRTFGGG |
| | | TKVEIK |
| IL1RL1- | 2101 | DIQMTQSPSSLSASVGDRVTITCRASQTISTSLNWYQQKPGKAPKLLIYAS |
| 478 | | STLQRGIPSRFSGSGSGTDFTLTISSLQPEDFATYYCQQSYRNPRTFGGGT |
| | | KVEIK |
| IL1RL1- | 2102 | DIQMTQSPSSLSASVGDRVTITCRASQSISRYLSWYQQKPGKAPKLLIYA |
| 479 | | GSKLQRGVPSRFSGSGSGTDFTLTISSLQPEDFATYYCQQTYSTPIAFGGG |
| | | TKVEIK |
| IL1RL1- | 2103 | DIQMTQSPSSLSASVGDRVTITCRASQSISRYLSWYQQKPGKAPKLLIYA |
| 480 | | ASNLESGVPSRFSGSGSGTDFTLTISSLQPEDFATYYCQQSSSTPLTFGGG |
| | | TKVEIK |
| IL1RL1- | 2104 | DIQMTQSPSSLSASVGDRVTITCRASQRINTYLNWYQQKPGKAPKLLIYG |
| 481 | | AVNLQSGVPSRFSGSGSGTDFTLTISSLQPEDFATYYCQQSFSPPLTFGGG |
| | | TKVEIK |
| IL1RL1- | 2105 | DIQMTQSPSSLSASVGDRVTITCRASHSISRYLNWYQQKPGKAPKLLIYA |
| 482 | | GSGLQSGVPSRFSGSGSGTDFTLTISSLQPEDFATYYCQQSFTIPYTFGGG |
| | | TKVEIK |
| IL1RL1- | 2106 | DIQMTQSPSSLSASVGDRVTITCRASQUISTSLNWYQQKPGKAPKLLIYRA |
| 483 | | SNLQRGVPSRFSGSGSGTDFTLTISSLQPEDFATYYCQQNYITPLTFGGGT |
| | | KVEIK |
| IL1RL1- | 2107 | DIQMTQSPSSLSASVGDRVTITCRASQSITRHLNWYQQKPGKAPKLLIYA |
| 484 | | ATSLQTGVPSRFSGSGSGTDFTLTISSLQPEDFATYYCQQSYSSPHTFGGG |
| | | TKVEIK |
| IL1RL1- | 2108 | DIQMTQSPSSLSASVGDRVTITCRASQSISRYLSWYQQKPGKAPKLLIYA |
| 485 | | GSKLQRGVPSRFSGSGSGTDFTLTISSLQPEDFATYYCQQTYSTPIAFGGG |
| | | TKVEIK |
| IL1RL1- | 2109 | DIQMTQSPSSLSASVGDRVTITCRASQPISSHLNWYQQKPGKAPKLLIYR |
| 486 | | ASNLRSGVPSRFSGSGSGTDFTLTISSLQPEDFATYYCQQSHSTPVTFGGG |
| | | TKVEIK |
| IL1RL1- | 2110 | DIQMTQSPSSLSASVGDRVTITCRASQSISSSLTWYQQKPGKAPKLLIYGA |
| 487 | | SSLRSGVPSRFSGSGSGTDFTLTISSLQPEDFATYYCQQSHTFGGGTKVEI |
| | | K |
| IL1RL1- | 2111 | DIQMTQSPSSLSASVGDRVTITCRASHSISRYLNWYQQKPGKAPKLLIYR |
| 488 | | ASNLQTGVPSRFSGSGSGTDFTLTISSLQPEDFATYYCQQAYSSPPTFGGG |
| | | TKVEIK |
| IL1RL1- | 2112 | DIQMTQSPSSLSASVGDRVTITCRASQSISRYLSWYQQKPGKAPKLLIYA |
| 489 | | GSKLQRGVPSRFSGSGSGTDFTLTISSLQPEDFATYYCQQTYSTPIAFGGG |
| | | TKVEIK |

TABLE 14
IL1RL2 Variable Light Chain Domain Sequences

| | SEQ | |
|---|---|---|
| IL1RL2 | ID | |
| Variant | NO | VL Sequence |
| ILIRL2- | 2113 | DIQMTQSPSSLSASVGDRVTITCRASQNIRSYLNWYQQKPGKAPKLLIYD |
| 153 | | DIDRPSGVPSRFSGSGSGTDFTLTISSLQPEDFATYYCQTWGPGIRVFGQG |
| | | TKVEIK |
| ILIRL2- | 2114 | DIQMTQSPSSLSASVGDRVTITCRPSQRISRYLNWYQQKPGKAPKLLIYH |
| 154 | | TSRLQDGVPSRFSGSGSGTDFTLTISSLQPEDFATYYCQSYDKSNVVFGQ |
| | | GTKVEIK |
| ILIRL2- | 2115 | DIQMTQSPSSLSASVGDRVTITCRASQSISSYVNWYQQKPGKAPKLLIYA |
| 155 | | KNNRPSGVPSRFSGSGSGTDFTLTISSLQPEDFATYYCQQYSGYPITFGQG |
| | | TKVEIK |
| ILIRL2- | 2116 | DIQMTQSPSSLSASVGDRVTITCRASQSIRRYLNWYQQKPGKAPKLLIYD |
| 156 | | ASSSQSGVPSRFSGSGSGTDFTLTISSLQPEDFATYYCQQSTILPLTFGQ |
| | | GTKVEIK |
| ILIRL2- | 2117 | DIQMTQSPSSLSASVGDRVTITCRASQTIERRLNWYQQKPGKAPKLLIYQ |
| 157 | | ASSLQSGVPSRFSGSGSGTDFTLTISSLQPEDFATYYCQQSYKYPLTFGQG |
| | | TKVEIK |
| ILIRL2- | 2118 | DIQMTQSPSSLSASVGDRVTITCRASQGVRTSLAWYQQKPGKAPKLLIYA |
| 158 | | TSTLQSGVPSRFSGSGSGTDFTLTISSLQPEDFATYYCAQGLRKPKTFGQG |
| | | TKVEIK |
| ILIRL2- | 2119 | DIQMTQSPSSLSASVGDRVTITCRASQFIGRYFNWYQQKPGKAPKLLIYG |
| 159 | | ENSRPSGVPSRFSGSGSGTDFTLTISSLQPEDFATYYCQQSHNIPLTFGQGT |
| | | KVEIK |
| ILIRL2- | 2120 | DIQMTQSPSSLSASVGDRVTITCRASQTIGDYLNWYQQKPGKAPKLLIYD |
| 160 | | ASSSQSGVPSRFSGSGSGTDFTLTISSLQPEDFATYYCQQSYKYPLTFGQG |
| | | TKVEIK |
| IL1RL2- | 2121 | DIQMTQSPSSLSASVGDRVTITCKASQHVITHVTWYQQKPGKAPKLLIYD |
| 161 | | DIDRPSGVPSRFSGSGSGTDFTLTISSLQPEDFATYYCQQNNNWPTTFGQ |
| | | GTKVEIK |
| ILIRL2- | 2122 | DIQMTQSPSSLSASVGDRVTITCQGGSPRSYYASWYQQKPGKAPKLLIYH |
| 162 | | TSRLQDGVPSRFSGSGSGTDFTLTISSLQPEDFATYYCQSYDKSNVVFGQ |
| | | GTKVEIK |
| ILIRL2- | 2123 | DIQMTQSPSSLSASVGDRVTITCRASQGVRTSLAWYQQKPGKAPKLLIYA |
| 163 | | TSTLQSGVPSRFSGSGSGTDFTLTISSLQPEDFATYYCAQGLRKPKTFGQG |
| | | TKVEIK |
| ILIRL2- | 2124 | DIQMTQSPSSLSASVGDRVTITCLASEGISSYLAWYQQKPGKAPKLLIYG |
| 164 | | ENSRPSGVPSRFSGSGSGTDFTLTISSLQPEDFATYYCQQSNSWPYTFGQG |
| | | TKVEIK |
| ILIRL2- | 2125 | DIQMTQSPSSLSASVGDRVTITCSGHNLGDKFASWYQQKPGKAPKLLIYS |
| 165 | | ASNLESGVPSRFSGSGSGTDFTLTISSLQPEDFATYYCQSYASQGIHYVFG |
| | | QGTKVEIK |
| IL1RL2- | 2126 | DIQMTQSPSSLSASVGDRVTITCRASQSILSYLNWYQQKPGKAPKLLIYY |
| 166 | | ANYLQTGVPSRFSGSGSGTDFTLTISSLQPEDFATYYCQQSYKSPLTFGQ |
| | | GTKVEIK |
| IL1RL2- | 2127 | DIQMTQSPSSLSASVGDRVTITCSGDKLGHTYTSWYQQKPGKAPKLLIYG |
| 167 | | KKNRPSGVPSRFSGSGSGTDFTLTISSLQPEDFATYYCQQSYSTPGITFGQ |
| | | GTKVEIK |
| ILIRL2- | 2128 | DIQMTQSPSSLSASVGDRVTITCRASQSISGYLNWYQQKPGKAPKLLIYH |
| 168 | | TSRLQSGVPSRFSGSGSGTDFTLTISSLQPEDFATYYCQQSYSIPPTFGQGT |
| | | KVEIK |
| ILIRL2- | 2129 | DIQMTQSPSSLSASVGDRVTITCSGDRLGEKYVSWYQQKPGKAPKLLIY |
| 169 | | QASSLQSGVPSRFSGSGSGTDFTLTISSLQPEDFATYYCFQGSHIPYTFGQ |
| | | GTKVEIK |
| ILIRL2- | 2130 | DIQMTQSPSSLSASVGDRVTITCSASQDINKYLNWYQQKPGKAPKLLIYH |
| 170 | | TSRLQDGVPSRFSGSGSGTDFTLTISSLQPEDFATYYCQQSYTTPWTFGQ |
| | | GTKVEIK |
| ILIRL2- | 2131 | DIQMTQSPSSLSASVGDRVTITCRASQTIGDYLNWYQQKPGKAPKLLIYH |
| 171 | | DNKRPSGVPSRFSGSGSGTDFTLTISSLQPEDFATYYCQQWSRNPPTFGQ |
| | | GTKVEIK |
| ILIRL2- | 2132 | DIQMTQSPSSLSASVGDRVTITCRASQFIGRYFNWYQQKPGKAPKLLIYH |
| 172 | | TSRLHSGVPSRFSGSGSGTDFTLTISSLQPEDFATYYCQAWESSTVVFGQ |
| | | GTKVEIK |
| ILIRL2- | 2133 | DIQMTQSPSSLSASVGDRVTITCRPNQNIATYINWYQQKPGKAPKLLIYQ |
| 173 | | MSHLASGVPSRFSGSGSGTDFTLTISSLQPEDFATYYCQQSYSTPSFGQGT |
| | | KVEIK |
| ILIRL2- | 2134 | DIQMTQSPSSLSASVGDRVTITCRASQSILSYLNWYQQKPGKAPKLLIYG |
| 174 | | SSYLQSGVPSRFSGSGSGTDFTLTISSLQPEDFATYYCQQGKTLPLTFGQG |
| | | TKVEIK |
| ILIRL2- | 2135 | DIQMTQSPSSLSASVGDRVTITCQGASLRNYYASWYQQKPGKAPKLLIY |
| 175 | | AASDLESGVPSRFSGSGSGTDFTLTISSLQPEDFATYYCASRSSKGNPHVL |
| | | FGQGTKVEIK |
| ILIRL2- | 2136 | DIQMTQSPSSLSASVGDRVTITCSGDNLRGYYASWYQQKPGKAPKLLIY |
| 176 | | QNDKRPSGVPSRFSGSGSGTDFTLTISSLQPEDFATYYCFQGSHAPLTFGQ |
| | | GTKVEIK |
| IL1RL2- | 2137 | DIQMTQSPSSLSASVGDRVTITCRTSQDISNYLNWYQQKPGKAPKLLIYT |
| 177 | | ASNLQNGVPSRFSGSGSGTDFTLTISSLQPEDFATYYCQQGIILPITFGQGT |
| | | KVEIK |
| ILIRL2- | 2138 | DIQMTQSPSSLSASVGDRVTITCSGDNLRGYYASWYQQKPGKAPKLLIY |
| 178 | | GTSDLQSGVPSRFSGSGSGTDFTLTISSLQPEDFATYYCYSRDRSGNHLG |
| | | MFGQGTKVEIK |
| IL1RL2- | 2139 | DIQMTQSPSSLSASVGDRVTITCRASENIYSNLAWYQQKPGKAPKLLIYA |
| 179 | | ASDLESGVPSRFSGSGSGTDFTLTISSLQPEDFATYYCGATDLSPWSIVFD |
| | | QGTKVEIK |
| ILIRL2- | 2140 | DIQMTQSPSSLSASVGDRVTITCRASQSISSYVNWYQQKPGKAPKLLIYQ |
| 180 | | NDKRPSGVPSRFSGSGSGTDFTLTISSLQPEDFATYYCQPSFYFPYAFGQG |
| | | TKVEIK |
| ILIRL2- | 2141 | DIQMTQSPSSLSASVGDRVTITCTGDKLAEKYVSWYQQKPGKAPKLLIY |
| 181 | | AKNNRPSGVPSRFSGSGSGTDFTLTISSLQPEDFATYYCQQWSSNPLTFG |
| | | QGTKVEIK |
| ILIRL2- | 2142 | DIQMTQSPSSLSASVGDRVTITCSASQDINKYLNWYQQKPGKAPKLLIYP |
| 182 | | KHNRPPGVPSRFSGSGSGTDFTLTISSLQPEDFATYYCQQSYFSPWTFGQ |
| | | GTKVEIK |
| ILIRL2- | 2143 | DIQMTQSPSSLSASVGDRVTITCRSSQSIVHSVGNTFLEWYQQKPGKAPK |
| 183 | | LLIYAASNVESGVPSRFSGSGSGTDFTLTISSLQPEDFATYYCVSRAVVGN |
| | | PHVLFGQGTKVEIK |
| ILIRL2- | 2144 | DIQMTQSPSSLSASVGDRVTITCRASQTIGDYLNWYQQKPGKAPKLLIYT |
| 184 | | ASNLQNGVPSRFSGSGSGTDFTLTISSLQPEDFATYYCQQGFSNPWTFGQ |
| | | GTKVEIK |
| ILIRL2- | 2145 | DIQMTQSPSSLSASVGDRVTITCRASQSIRRFLNWYQQKPGKAPKLLIYQ |
| 185 | | ASSLQSGVPSRFSGSGSGTDFTLTISSLQPEDFATYYCQQSHSSPLTFGQG |
| | | TKVEIK |
| IL1RL2- | 2146 | DIQMTQSPSSLSASVGDRVTITCRASQSIVTYLNWYQQKPGKAPKLLIYH |
| 186 | | TSRLQDGVPSRFSGSGSGTDFTLTISSLQPEDFATYYCQQYSGYPITFGQG |
| | | TKVEIK |
| ILIRL2- | 2147 | DIQMTQSPSSLSASVGDRVTITCRASQSISSYVNWYQQKPGKAPKLLIYG |
| 187 | | SSYLQSGVPSRFSGSGSGTDFTLTISSLQPEDFATYYCQQNNNWPTTFGQ |
| | | GTKVEIK |
| ILIRL2- | 2148 | DIQMTQSPSSLSASVGDRVTITCSASQDINKYLNWYQQKPGKAPKLLIYP |
| 188 | | KHNRPPGVPSRFSGSGSGTDFTLTISSLQPEDFATYYCQQSYFSPWTFGQ |
| | | GTKVEIK |
| ILIRL2- | 2149 | DIQMTQSPSSLSASVGDRVTITCRASQTIGDYLNWYQQKPGKAPKLLIYD |
| 189 | | ASNLQSGVPSRFSGSGSGTDFTLTISSLQPEDFATYYCQQSYSTPSFGQGT |
| | | KVEIK |
| IL1RL2- | 2150 | DIQMTQSPSSLSASVGDRVTITCRASQTIGDYLNWYQQKPGKAPKLLIYD |
| 190 | | ASSLHTGVPSRFSGSGSGTDFTLTISSLQPEDFATYYCQQSYGTSWTFGQ |
| | | GTKVEIK |
| ILIRL2- | 2151 | DIQMTQSPSSLSASVGDRVTITCRASQTIGDYLNWYQQKPGKAPKLLIYD |
| 191 | | ASSSQSGVPSRFSGSGSGTDFTLTISSLQPEDFATYYCQAWDTSTAVFGQ |
| | | GTKVEIK |
| IL1RL2- | 2152 | DIQMTQSPSSLSASVGDRVTITCLASEGISSYLAWYQQKPGKAPKLLIYG |
| 192 | | ENSRPSGVPSRFSGSGSGTDFTLTISSLQPEDFATYYCQQSNSWPYTFGQG |
| | | TKVEIK |
| ILIRL2- | 2153 | DIQMTQSPSSLSASVGDRVTITCRASQTISSYLNWYQQKPGKAPKLLIYH |
| 193 | | TSRLQSGVPSRFSGSGSGTDFTLTISSLQPEDFATYYCQQGYRWPVTFGQ |
| | | GTKVEIK |
| ILIRL2- | 2154 | DIQMTQSPSSLSASVGDRVTITCRASQPIGPDLLWYQQKPGKAPKLLIYG |
| 194 | | RNKRPSGVPSRFSGSGSGTDFTLTISSLQPEDFATYYCSQTTHVPWTFGQ |
| | | GTKVEIK |
| ILIRL2- | 2155 | DIQMTQSPSSLSASVGDRVTITCQASQSIYSFLSWYQQKPGKAPKLLIYHT |
| 195 | | SRLQDGVPSRFSGSGSGTDFTLTISSLQPEDFATYYCQSYDFDFAVFGQG |
| | | TKVEIK |
| ILIRL2- | 2156 | DIQMTQSPSSLSASVGDRVTITCRASQSILSYLNWYQQKPGKAPKLLIYG |
| 196 | | SSLQSGVPSRFSGSGSGTDFTLTISSLQPEDFATYYCQQGKTLPLTFGQGT |
| | | KVEIK |
| ILIRL2- | 2157 | DIKMTQSPSSLSASVGGRVTITCSGDKLGDKYAYWYQQKPGKAPKLLIY |
| 197 | | HTSRLHSGVPSRFSGSGSGTDFTLTISSLQPEDFATYYCAQGWGRPVTFG |
| | | QGTKVEIK |
| ILIRL2- | 2158 | DIQMTQSPSSLSASVGDRVTITCRASHNINSYLNWYQQKPGKAPKLLIYG |
| 198 | | ASRLQRGVPSRFSGSGSGTDFTLTISSLQPEDFATYYCQSYDLKSLNVVF |
| | | GQGTKVEIK |
| ILIRL2- | 2159 | EIVLTQSPGTLSLSPGERATLSCRASQTVSRNSLAWYQQKPGQAPRLLIY |
| 199 | | GASSRATGIPDRFSGSGSGTDFTLTISSLEPEDFAVYYCQHFGNSLYTFGQ |
| | | GTKVEIK |
| IL1RL2- | 2160 | DIQMTQSPSSLSASVGDRVTITCRASQGVRTSLAWYQQKPGKAPKLLIYA |
| 200 | | TSTLQSGVPSRFSGSGSGTDFTLTISSLQPEDFATYYCAQGLRKPKTFGQG |
| | | TKVEIK |
| ILIRL2- | 2161 | DIQMTQSPSSLSASVGDRVTITCRASQSILSYLNWYQQKPGKAPKLLIYG |
| 201 | | ASSLESGVPSRFSGSGSGTDFTLTISSLQPEDFATYYCQQGYRWPVTFGQ |
| | | GTKVEIK |
| ILIRL2- | 2162 | DIQMTQSPSSLSASVGDRVTITCRANQNIGNFLNWYQQKPGKAPKLLIYT |
| 202 | | ASTLQSGVPSRFSGSGSGTDFTLTISSLQPEDFATYYCAQGWGRPVTFGQ |
| | | GTKVEIK |
| ILIRL2- | 2163 | DIQMTQSPSSLSASVGDRVTITCLASEGISSYLAWYQQKPGKAPKLLIYG |
| 203 | | ENSRPSGVPSRFSGSGSGTDFTLTISSLQPEDFATYYCAQGLRKPKTFGQG |
| | | TKVEIK |
| ILIRL2- | 2164 | DIQMTQSPSSLSASVGDRVTITCRASQGVRTSLAWYQQKPGKAPKLLIYR |
| 204 | | TSWLQSGVPSRFSGSGSGTDFTLTISSLQPEDFATYYCLQDYNLWTFGQG |
| | | TKVEIK |
| ILIRL2- | 2165 | DIQMTQSPSSLSASVGDRVTITCRASQSILSYLNWYQQKPGKAPKLLIYY |
| 205 | | ANSLQTGVPSRFSGSGSGTDFTLTISSLQPEDFATYYCQQGYRWPVTFGQ |
| | | GTKVEIK |
| ILIRL2- | 2166 | DIQMTQSPSSLSASVGDRVTITCRASQDIYQNLDWYQQKPGKAPKLLIYH |
| 206 | | TSRLHSGVPSRFSGSGSGTDFTLTISSLQPEDFATYYCQQTYSIPYTFGQG |
| | | TKVEIK |
| ILIRL2- | 2167 | DIQMTQSPSSLSASVGDRVTITCRASQTIGDYLNWYQQKPGKAPKLLIYD |
| 207 | | ASSSQSGVPSRFSGSGSGTDFTLTISSLQPEDFATYYCQQSYKYPLTFGQG |
| | | TKVEIK |
| ILIRL2- | 2168 | DIQMTQSPSSLSASVGDRVTITCRTSQDIWNYLNWYQQKPGKAPKLLIY |
| 208 | | GASSLESGVPSRFSGSGSGTDFTLTISSLQPEDFATYYCQAWDTNTVVFG |
| | | QGTKVEIK |
| ILIRL2- | 2169 | EIVLTQSPGTLSLSPGERATLSCRASQSVNSRYLAWYQQKPGQAPRLLIY |
| 209 | | GASSRATGIPDRFSGSGSGTDFTLTISSLEPEDFAVYYCQQYDPSTGYSFG |
| | | QGTKVEIK |
| ILIRL2- | 2170 | DIQMTQSPSSLSASVGDRVTITCRASQNIRSYLNWYQQKPGKAPKLLIYD |
| 210 | | DIDRPSGVPSRFSGSGSGTDFTLTISSLQPEDFATYYCQTWGPGIRVFGQG |
| | | TKVEIK |
| ILIRL2- | 2171 | DIQMTQSPSSLSASVGDRVTITCRASQSISSYLHWYQQKPGKAPKLLIYW |
| 211 | | ASDRESGVPSRFSGSGSGTDFTLTISSLQPEDFATYYCGQSYTFPYTFGQG |
| | | TKVEIK |
| ILIRL2- | 2172 | DIQMTQSPSSLSASVGDRVTITCRASQTIERRLNWYQQKPGKAPKLLIYD |
| 212 | | DIDRPSGVPSRFSGSGSGTDFTLTISSLQPEDFATYYCQQTYDTPLTFGQG |
| | | TKVEIK |
| ILIRL2- | 2173 | DIQMTQSPSSLSASVGDRVTITCRASQDIKNYLNWYQQKPGKAPKLLIYD |
| 213 | | ASSLHTGVPSRFSGSGSGTDFTLTISSLQPEDFATYYCGFDNGGDIDVFGQ |
| | | GTKVEIK |
| IL1RL2- | 2174 | DIQMTQSPSSLSASVGDRVTITCLASEGISSYLAWYQQKPGKAPKLLIYG |
| 214 | | ENSRPSGVPSRFSGSGSGTDFTLTISSLQPEDFATYYCQQSNSWPYTFGQG |
| | | TKVEIK |
| ILIRL2- | 2175 | DIQMTQSPSSLSASVGDRVTITCRASQSILSYLNWYQQKPGKAPKLLIYH |
| 215 | | TSRLHSGVPSRFSGSGSGTDFTLTISSLQPEDFATYYCQQGYRWPVTFGQ |
| | | GTKVEIK |
| ILIRL2- | 2176 | DIQMTQSPSSLSASVGDRVTITCSASQDINKYLNWYQQKPGKAPKLLIYY |
| 216 | | ANSLQTGVPSRFSGSGSGTDFTLTISSLQPEDFATYYCQPSFLYPYTFGQG |
| | | TKVEIK |
| ILIRL2- | 2177 | DIQMTQSPSSLSASVGDRVTITCRASQTIGDYLNWYQQKPGKAPKLLIYD |
| 217 | | ASSSQSGVPSRFSGSGSGTDFTLTISSLQPEDFATYYCQQSYKYPLTFGQG |
| | | TKVEIK |
| ILIRL2- | 2178 | DIQMTQSPSSLSASVGDRVTITCRASQFIGRYFNWYQQKPGKAPKLLIYG |
| 218 | | ENSRPSGVPSRFSGSGSGTDFTLTISSLQPEDFATYYCQQSHNIPLTFGQGT |
| | | KVEIK |
| ILIRL2- | 2179 | DIQMTQSPSSLSASVGDRVTITCRASQFIGRYFNWYQQKPGKAPKLLIYG |
| 219 | | ENSRPSGVPSRFSGSGSGTDFTLTISSLQPEDFATYYCQQSHNIPLTFGQGT |
| | | KVEIK |
| ILIRL2- | 2180 | DIQMTQSPSSLSASVGDRVTITCRASQNIRSYLNWYQQKPGKAPKLLIYE |
| 220 | | NNNRPSGVPSRFSGSGSGTDFTLTISSLQPEDFATYYCQNVLNTPLTFGQG |
| | | TKVEIK |
| ILIRL2- | 2181 | DIQMTQSPSSLSASVGDRVTITCSASQDINKYLNWYQQKPGKAPKLLIYP |
| 221 | | KHNRPPGVPSRFSGSGSGTDFTLTISSLQPEDFATYYCQQSYFSPWTFGQ |
| | | GTKVEIK |
| IL1RL2- | 2182 | DIQMTQSPSSLSASVGDRVTITCRASQPIAYFLSWYQQKPGKAPKLLIYD |
| 222 | | TSKVASGVPSRFSGSGSGTDFTLTISSLQPEDFATYYCQQYQSLPLTFGQG |
| | | TKVEIK |
| ILIRL2- | 2183 | DIQMTQSPSSLSASVGDRVTITCQGDFLRSYYASWYQQKPGKAPKLLIYG |
| 223 | | KNIRPSGVPSRFSGSGSGTDFTLTISSLQPEDFATYYCASRSSKGNPHVLF |
| | | GQGTKVEIK |
| ILIRL2- | 2184 | DIQMTQSPSSLSASVGDRVTITCRASQGVRTSLAWYQQKPGKAPKLLIYA |
| 224 | | TSTLQSGVPSRFSGSGSGTDFTLTISSLQPEDFATYYCAQGLRKPKTFGQG |
| | | TKVEIK |
| IL1RL2- | 2185 | DIQMTQSPSSLSASVGDRVTITCRASQGVRTSLAWYQQKPGKAPKLLIYA |
| 225 | | TSTLQSGVPSRFSGSGSGTDFTLTISSLQPEDFATYYCAQGLRKPKTFGQG |
| | | TKVEIK |
| ILIRL2- | 2186 | DIQMTQSPSSLSASVGDRVTITCSGHNLGDKFASWYQQKPGKAPKLLIY |
| 226 | | GNNNRPSGVPSRFSGSGSGTDFTLTISSLQPEDFATYYCSSRDKSGSRLVT |
| | | FGQGTKVEIK |
| ILIRL2- | 2187 | DIQMTQSPSSLSASVGDRVTITCRASQGVRTSLAWYQQKPGKAPKLLIYA |
| 227 | | TSTLQSGVPSRFSGSGSGTDFTLTISSLQPEDFATYYCAQGLRKPKTFGQG |
| | | TKVEIK |
| ILIRL2- | 2188 | DIQMTQSPSSLSASVGDRVTITCSGDLRSYYVHWYQQKPGKAPKLLIYH |
| 228 | | ASQSISGVPSRFSGSGSGTDFTLTISSLQPEDFATYYCQAWGSSTVIFGQG |
| | | TKVEIK |
| IL1RL2- | 2189 | DIQMTQSPSSLSASVGDRVTITCRASQNIRSYLNWYQQKPGKAPKLLIYD |
| 229 | | DIDRPSGVPSRFSGSGSGTDFTLTISSLQPEDFATYYCAQGLRKPKTFGQG |
| | | TKVEIK |
| ILIRL2- | 2190 | DIQMTQSPSSLSASVGDRVTITCSASQDINKYLNWYQQKPGKAPKLLIYA |
| 230 | | VTSLASGVPSRFSGSGSGTDFTLTISSLQPEDFATYYCQPSFYLPYTFGQG |
| | | TKVEIK |
| ILIRL2- | 2191 | DIQMTQSPSSLSASVGDRVTITCSASSSVSYMYWYQQKPGKAPKLLIYHT |
| 231 | | SRLQSGVPSRFSGSGSGTDFTLTISSLQPEDFATYYCQQSYHTPQTFGQGT |
| | | KVEIK |
| ILIRL2- | 2192 | DIQMTQSPSSLSASVGDRVTITCRASQPIGPDLLWYQQKPGKAPKLLIYY |
| 232 | | NSERPSGVPSRFSGSGSGTDFTLTISSLQPEDFATYYCLAWDTRTSGAVFG |
| | | QGTKVEIK |
| ILIRL2- | 2193 | DIQMTQSPSSLSASVGDRVTITCSGDNLRGYYASWYQQKPGKAPKLLIY |
| 233 | | GTSYRYSGVPSRFSGSGSGTDFTLTISSLQPEDFATYYCQAWDTNTVVFG |
| | | QGTKVEIK |
| ILIRL2- | 2194 | DIQMTQSPSSLSASVGDRVTITCRASQTIGDYLNWYQQKPGKAPKLLIYD |
| 234 | | ASSSQSGVPSRFSGSGSGTDFTLTISSLQPEDFATYYCQQSYKYPLTFGQG |
| | | TKVEIK |
| ILIRL2- | 2195 | DIQMTQSPSSLSASVGDRVTITCLASEGISSYLAWYQQKPGKAPKLLIYG |
| 235 | | ENSRPSGVPSRFSGSGSGTDFTLTISSLQPEDFATYYCQQSYKYPLTFGQG |
| | | TKVEIK |
| ILIRL2- | 2196 | DIQMTQSPSSLSASVGDRVTITCRPSQRISRYLNWYQQKPGKAPKLLIYA |
| 236 | | TSNLASGVPSRFSGSGSGTDFTLTISSLQPEDFATYYCQQSLRTPFTFGQG |
| | | TKVEIK |
| ILIRL2- | 2197 | DIQMTQSPSSLSASVGDRVTITCLASEGISSYLAWYQQKPGKAPKLLIYG |
| 237 | | ENSRPSGVPSRFSGSGSGTDFTLTISSLQPEDFATYYCQQSNSWPYTFGQG |
| | | TKVEIK |
| ILIRL2- | 2198 | DIQMTQSPSSLSASVGDRVTITCSGHNLGDKFASWYQQKPGKAPKLLIYS |
| 238 | | ASNLESGVPSRFSGSGSGTDFTLTISSLQPEDFATYYCQSYASQGIHYVFG |
| | | QGTKVEIK |
| ILIRL2- | 2199 | DIQMTQSPSSLSASVGDRVTITCRASQGVRTSLAWYQQKPGKAPKLLIYA |
| 239 | | TSTLQSGVPSRFSGSGSGTDFTLTISSLQPEDFATYYCAQGLRKPKTFGQG |
| | | TKVEIK |
| IL1RL2- | 2200 | DIQMTQSPSSLSASVGDRVTITCRASQFIGRYFNWYQQKPGKAPKLLIYG |
| 240 | | ENSRPSGVPSRFSGSGSGTDFTLTISSLQPEDFATYYCQQSNSWPYTFGQG |
| | | TKVEIK |
| ILIRL2- | 2201 | DIQMTQSPSSLSASVGDRVTITCSASSSVSYMYWYQQKPGKAPKLLIYGK |
| 241 | | NIRPSGVPSRFSGSGSGTDFTLTISSLQPEDFATYYCQHSRDLTFPFGQGT |
| | | KVEIK |
| ILIRL2- | 2202 | DIQMTQSPSSLSASVGDRVTITCRASQSIRRYLNWYQQKPGKAPKLLIYD |
| 242 | | ASSSQSGVPSRFSGSGSGTDFTLTISSLQPEDFATYYCQQSTILPLTFGQGT |
| | | KVEIK |
| IL1RL2- | 2203 | DIQMTQSPSSLSASVGDRVTITCKASENVDTYVSWYQQKPGKAPKLLIY |
| 243 | | GTSDLQSGVPSRFSGSGSGTDFTLTISSLQPEDFATYYCSSWAGSRSGTVF |
| | | GQGTKVEIK |
| IL1RL2- | 2204 | DIQMTQSPSSLSASVGDRVTITCRASQFIGRYFNWYQQKPGKAPKLLIYG |
| 244 | | ENSRPSGVPSRFSGSGSGTDFTLTISSLQPEDFATYYCQQSHNIPLTFGQGT |
| | | KVEIK |
| ILIRL2- | 2205 | DIQMTQSPSSLSASVGDRVTITCRASQSILSYLNWYQQKPGKAPKLLIYA |
| 245 | | ASDLESGVPSRFSGSGSGTDFTLTISSLQPEDFATYYCQQGYRWPVTFGQ |
| | | GTKVEIK |
| ILIRL2- | 2206 | DIQMTQSPSSLSASVGDRVTITCRASQSILSYLNWYQQKPGKAPKLLIYG |
| 246 | | NNNRPSGVPSRFSGSGSGTDFTLTISSLQPEDFATYYCQQGYRWPVTFGQ |
| | | GTKVEIK |
| ILIRL2- | 2207 | DIQMTQSPSSLSASVGDRVTITCRASQTIGDYLNWYQQKPGKAPKLLIYD |
| 247 | | ASSSQSGVPSRFSGSGSGTDFTLTISSLQPEDFATYYCQQSYKYPLTFGQG |
| | | TKVEIK |
| ILIRL2- | 2208 | DIQMTQSPSSLSASVGDRVTITCRASQTIERRLNWYQQKPGKAPKLLIYA |
| 248 | | ASTLQRGVPSRFSGSGSGTDFTLTISSLQPEDFATYYCQQGSSLPLTFGQG |
| | | TKVEIK |
| IL1RL2- | 2209 | DIQMTQSPSSLSASVGDRVTITCRASQTIERRLNWYQQKPGKAPKLLIYD |
| 249 | | ASSLHTGVPSRFSGSGSGTDFTLTISSLQPEDFATYYCQQSYETPLTFGQG |
| | | TKVEIK |
| ILIRL2- | 2210 | DIQMTQSPSSLSASVGDRVTITCRASQSIRRYLNWYQQKPGKAPKLLIYD |
| 250 | | ASSSQSGVPSRFSGSGSGTDFTLTISSLQPEDFATYYCQQSTILPLTFGQGT |
| | | KVEIK |
| IL1RL2- | 2211 | DIQMTQSPSSLSASVGDRVTITCQASQSISSYLAWYQQKPGKAPKLLIYQ |
| 251 | | MSHLASGVPSRFSGSGSGTDFTLTISSLQPEDFATYYCQQSYRPPITFGQG |
| | | TKVEIK |
| ILIRL2- | 2212 | DIQMTQSPSSLSASVGDRVTITCRASQDVSSGVAWYQQKPGKAPKLLIY |
| 252 | | AASDLESGVPSRFSGSGSGTDFTLTISSLQPEDFATYYCQASFYFPYTFGQ |
| | | GTKVEIK |
| IL1RL2- | 2213 | DIQMTQSPSSLSASVGDRVTITCSGDKLGDKYTSWYQQKPGKAPKLLIYS |
| 253 | | ASVLQSGVPSRFSGSGSGTDFTLTISSLQPEDFATYYCHSRASSDTHVRVF |
| | | GQGTKVEIK |
| ILIRL2- | 2214 | DIQMTQSPSSLSASVGDRVTITCRASQSIRRYLNWYQQKPGKAPKLLIYD |
| 254 | | ASSSQSGVPSRFSGSGSGTDFTLTISSLQPEDFATYYCQQSTILPLTFGQGT |
| | | KVEIK |
| ILIRL2- | 2215 | DIQMTQSPSSLSASVGDRVTITCRASQTIERRLNWYQQKPGKAPKLLIYS |
| 255 | | ASNLESGVPSRFSGSGSGTDFTLTISSLQPEDFATYYCQQSYKYPLTFGQG |
| | | TKVEIK |
| ILIRL2- | 2216 | DIQMTQSPSSLSASVGDRVTITCRASQGVRTSLAWYQQKPGKAPKLLIYA |
| 256 | | TSTLQSGVPSRFSGSGSGTDFTLTISSLQPEDFATYYCAQGLRKPKTFGQG |
| | | TKVEIK |
| ILIRL2- | 2217 | DIQMTQSPSSLSASVGDRVTITCRASQSIRRYLNWYQQKPGKAPKLLIYD |
| 257 | | ASSSQSGVPSRFSGSGSGTDFTLTISSLQPEDFATYYCQQSTILPLTFGQGT |
| | | KVEIK |
| ILIRL2- | 2218 | DIQMTQSPSSLSASVGDRVTITCSGDKLGHTYTSWYQQKPGKAPKLLIYD |
| 258 | | DIDRPSGVPSRFSGSGSGTDFTLTISSLQPEDFATYYCQSYDNDFYGTVFG |
| | | QGTKVEIK |
| ILIRL2- | 2219 | DIQMTQSPSSLSASVGDRVTITCRASQPIGPDLLWYQQKPGKAPKLLIYD |
| 259 | | TSKVASGVPSRFSGSGSGTDFTLTISSLQPEDFATYYCQQDAFHPPTFGQG |
| | | TKVEIK |
| IL1RL2- | 2220 | DIQMTQSPSSLSASVGDRVTITCRASQSIRRYLNWYQQKPGKAPKLLIYD |
| 260 | | ASSSQSGVPSRFSGSGSGTDFTLTISSLQPEDFATYYCQQSTILPLTFGQGT |
| | | KVEIK |
| ILIRL2- | 2221 | DIQMTQSPSSLSASVGDRVTITCKASENVDTYVSWYQQKPGKAPKLLIY |
| 261 | | YANSLQTGVPSRFSGSGSGTDFTLTISSLQPEDFATYYCQAWDNGAAVF |
| | | GQGTKVEIK |
| ILIRL2- | 2222 | DIQMTQSPSSLSASVGDRVTITCRASQSISSYVNWYQQKPGKAPKLLIYG |
| 262 | | NNNRPSGVPSRFSGSGSGTDFTLTISSLQPEDFATYYCQQSYSTPTFGQGT |
| | | KVEIK |
| ILIRL2- | 2223 | DIQMTQSPSSLSASVGDRVTITCLASEGISSYLAWYQQKPGKAPKLLIYG |
| 263 | | ENSRPSGVPSRFSGSGSGTDFTLTISSLQPEDFATYYCQQSNSWPYTFGQG |
| | | TKVEIK |
| ILIRL2- | 2224 | DIQMTQSPSSLSASVGDRVTITCQASQSIYSFLSWYQQKPGKAPKLLIYHT |
| 264 | | SRLQDGVPSRFSGSGSGTDFTLTISSLQPEDFATYYCQQSYTTPWTFGQG |
| | | TKVEIK |
| ILIRL2- | 2225 | DIQMTQSPSSLSASVGDRVTITCRASQTIGDYLNWYQQKPGKAPKLLIYD |
| 265 | | ASSSQSGVPSRFSGSGSGTDFTLTISSLQPEDFATYYCQQSHNIPLTFGQGT |
| | | KVEIK |
| ILIRL2- | 2226 | DIQMTQSPSSLSASVGDRVTITCSGHNLGDKFASWYQQKPGKAPKLLIYS |
| 266 | | ASNLESGVPSRFSGSGSGTDFTLTISSLQPEDFATYYCQSYASQGIHYVFG |
| | | QGTKVEIK |
| ILIRL2- | 2227 | DIQMTQSPSSLSASVGDRVTITCRASQFIGRYFNWYQQKPGKAPKLLIYG |
| 267 | | ENSRPSGVPSRFSGSGSGTDFTLTISSLQPEDFATYYCQQSHNIPLTFGQGT |
| | | KVEIK |
| IL1RL2- | 2228 | DIQMTQSPSSLSASVGDRVTITCRASQNIRSYLNWYQQKPGKAPKLLIYG |
| 268 | | ASSRATGVPSRFSGSGSGTDFTLTISSLQPEDFATYYCQQSYELPLTFGQG |
| | | TKVEIK |
| ILIRL2- | 2229 | DIQMTQSPSSLSASVGDRVTITCSGDNLRGYYASWYQQKPGKAPKLLIY |
| 269 | | GTSDLQSGVPSRFSGSGSGTDFTLTISSLQPEDFATYYCYSRDRSGNHLG |
| | | MFGQGTKVEIK |
| ILIRL2- | 2230 | DIQMTQSPSSLSASVGDRVTITCSASQDINKYLNWYQQKPGKAPKLLIYH |
| 270 | | TSRLQDGVPSRFSGSGSGTDFTLTISSLQPEDFATYYCQQSYTTPWTFGQ |
| | | GTKVEIK |
| IL1RL2- | 2231 | DIQMTQSPSSLSASVGDRVTITCRASHNINSYLNWYQQKPGKAPKLLIYG |
| 271 | | ASRLQRGVPSRFSGSGSGTDFTLTISSLQPEDFATYYCQSYDLKSLNVVF |
| | | GQGTKVEIK |
| ILIRL2- | 2232 | DIQMTQSPSSLSASVGDRVTITCRASQSILSYLNWYQQKPGKAPKLLIYR |
| 272 | | KSNRPSGVPSRFSGSGSGTDFTLTISSLQPEDFATYYCQQFAYFPATFGQG |
| | | TKVEIK |
| ILIRL2- | 2233 | DIQMTQSPSSLSASVGDRVTITCRASQGVRTSLAWYQQKPGKAPKLLIYA |
| 273 | | TSTLQSGVPSRFSGSGSGTDFTLTISSLQPEDFATYYCAQGLRKPKTFGQG |
| | | TKVEIK |
| ILIRL2- | 2234 | DIQMTQSPSSLSASVGDRVTITCQASQPIAYFLSWYQQKPGKAPKLLIYH |
| 274 | | TSRLHSGVPSRFSGSGSGTDFTLTISSLQPEDFATYYCQQYHSYPPTFGQG |
| | | TKVEIK |
| ILIRL2- | 2235 | DIQMTQSPSSLSASVGDRVTITCRASQFIGRYFNWYQQKPGKAPKLLIYH |
| 275 | | TSRLHSGVPSRFSGSGSGTDFTLTISSLQPEDFATYYCQAWESSTVVFGQ |
| | | GTKVEIK |
| ILIRL2- | 2236 | DIQMTQSPSSLSASVGDRVTITCRASQSIRRYLNWYQQKPGKAPKLLIYD |
| 276 | | ASSSQSGVPSRFSGSGSGTDFTLTISSLQPEDFATYYCQQSYKYPLTFGQG |
| | | TKVEIK |
| ILIRL2- | 2237 | DIQMTQSPSSLSASVGDRVTITCSGDLGEKYVSWYQQKPGKAPKLLIYQ |
| 277 | | ASSLQSGVPSRFSGSGSGTDFTLTISSLQPEDFATYYCFQGSHIPYTFGQGT |
| | | KVEIK |
| ILIRL2- | 2238 | DIQMTQSPSSLSASVGDRVTITCRASQNIRSYLNWYQQKPGKAPKLLIYD |
| 278 | | DIDRPSGVPSRFSGSGSGTDFTLTISSLQPEDFATYYCQTWGPGIRVFGQG |
| | | TKVEIK |
| ILIRL2- | 2239 | DIQMTQSPSSLSASVGDRVTITCSGDKLGHTYTSWYQQKPGKAPKLLIYG |
| 279 | | TSYRYSGVPSRFSGSGSGTDFTLTISSLQPEDFATYYCQQSYSTSWTFGQG |
| | | TKVEIK |
| ILIRL2- | 2240 | DIQMTQSPSSLSASVGDRVTITCRASQSIRRYLNWYQQKPGKAPKLLIYD |
| 280 | | ASSSQSGVPSRFSGSGSGTDFTLTISSLQPEDFATYYCQQSTILPLTFGQGT |
| | | KVEIK |
| ILIRL2- | 2241 | DIQMTQSPSSLSASVGDRVTITCRASQPIGPDLLWYQQKPGKAPKLLIYD |
| 281 | | DIDRPSGVPSRFSGSGSGTDFTLTISSLQPEDFATYYCQQTYSTPLTFGQG |
| | | TKVEIK |
| ILIRL2- | 2242 | DIQMTQSPSSLSASVGDRVTITCRASQNINYYLNWYQQKPGKAPKLLIYG |
| 282 | | ASNLHSGVPSRFSGSGSGTDFTLTISSLQPEDFATYYCLQDYNLWTFGQG |
| | | TKVEIK |
| ILIRL2- | 2243 | DIQMTQSPSSLSASVGDRVTITCRASLSISRYLNWYQQKPGKAPKLLIYT |
| 283 | | ASSLHSGVPSRFSGSGSGTDFTLTISSLQPEDFATYYCQQSYRTPPWTFGG |
| | | GTKVEIK |
| ILIRL2- | 2244 | DIQMTQSPSSLSASVGDRVTITCRASQSISVHLNWYQQKPGKAPKLLIYIA |
| 284 | | SNLQSGVPSRFSGSGSGTDFTLTISSLQPEDFATYYCQQTYTTPYTFGGGT |
| | | KVEIK |
| ILIRL2- | 2245 | DIQMTQSPSSLSASVGDRVTITCRASQTIGTYLNWYQQKPGKAPKLLIYG |
| 285 | | GSRLQSGVPSRFSGSGSGTDFTLTISSLQPEDFATYYCQQSYSTPYTFGGG |
| | | TKVEIK |
| ILIRL2- | 2246 | DIQMTQSPSSLSASVGDRVTITCRASQRISDYLHWYQQKPGKAPKLLIYG |
| 286 | | ATRLQSGVPSRFSGSGSGTDFTLTISSLQPEDFATYYCQQSHSTPTFGGGT |
| | | KVEIK |
| ILIRL2- | 2247 | DIQMTQSPSSLSASVGDRVTITCRASQTISTYLNWYQQKPGKAPKLLIYG |
| 287 | | ASNLQNGVPSRFSGSGSGTDFTLTISSLQPEDFATYYCQQSYSLPHTFGGG |
| | | TKVEIK |
| ILIRL2- | 2248 | DIQMTQSPSSLSASVGDRVTITCRASQIISNYLNWYQQKPGKAPKLLIYA |
| 288 | | ASRLQDGVPSRFSGSGSGTDFTLTISSLQPEDFATYYCQQSFITPLTFGGG |
| | | TKVEIK |
| ILIRL2- | 2249 | DIQMTQSPSSLSASVGDRVTITCRASQNIRSYLNWYQQKPGKAPKLLIYA |
| 289 | | TSNLQRGVPSRFSGSGSGTDFTLTISSLQPEDFATYYCQQSYRAPYIFGGG |
| | | TKVEIK |
| ILIRL2- | 2250 | DIQMTQSPSSLSASVGDRVTITCRASLSISRYLNWYQQKPGKAPKLLIYT |
| 290 | | ASSLHSGVPSRFSGSGSGTDFTLTISSLQPEDFATYYCQQSYRTPPWTFGG |
| | | GTKVEIK |
| ILIRL2- | 2251 | DIQMTQSPSSLSASVGDRVTITCRASQSIGIHLNWYQQKPGKAPKLLIYG |
| 291 | | ASRLQSGVPSRFSGSGSGTDFTLTISSLQPEDFATYYCQQSYTTPVTFGGG |
| | | TKVEIK |
| ILIRL2- | 2252 | DIQMTQSPSSLSASVGDRVTITCRASQSIGYYLNWYQQKPGKAPKLLIYS |
| 292 | | ATSLQSGVPSRFSGSGSGTDFTLTISSLQPEDFATYYCQHRGTFGGGTKV |
| | | EIK |
| ILIRL2- | 2253 | DIQMTQSPSSLSASVGDRVTITCRASQSIGNYVNWYQQKPGKAPKLLIYA |
| 293 | | ASNLEDGVPSRFSGSGSGTDFTLTISSLQPEDFATYYCQQSYNTPLTFGGG |
| | | TKVEIK |
| ILIRL2- | 2254 | DIQMTQSPSSLSASVGDRVTITCRASQTVSTYLNWYQQKPGKAPKLLIYG |
| 294 | | AFNLQNGVPSRFSGSGSGTDFTLTISSLQPEDFATYYCQQSYTLPHTFGG |
| | | GTKVEIK |
| ILIRL2- | 2255 | DIQMTQSPSSLSASVGDRVTITCRASQSIRSHLNWYQQKPGKAPKLLIYR |
| 295 | | ASTLQTGVPSRFSGSGSGTDFTLTISSLQPEDFATYYCQQSYSILPVTFGG |
| | | GTKVEIK |
| ILIRL2- | 2256 | DIQMTQSPSSLSASVGDRVTITCRASRSISTYLNWYQQKPGKAPKLLIYA |
| 296 | | ASSSQSGVPSRFSGSGSGTDFTLTISSLQPEDFATYYCQQTYATPWTFGG |
| | | GTKVEIK |
| ILIRL2- | 2257 | DIQMTQSPSSLSASVGDRVTITCRASQSIDTNLNWYQQKPGKAPKLLIYA |
| 297 | | ASNLQHGVPSRFSGSGSGTDFTLTISSLQPEDFATYYCQQSSSIPLTFGGG |
| | | TKVEIK |
| ILIRL2- | 2258 | DIQMTQSPSSLSASVGDRVTITCRASRSIDTYLNWYQQKPGKAPKLLIYG |
| 298 | | GSRLQSGVPSRFSGSGSGTDFTLTISSLQPEDFATYYCQQSYSTPPVTFGG |
| | | GTKVEIK |
| ILIRL2- | 2259 | DIQMTQSPSSLSASVGDRVTITCRASQSISTDLNWYQQKPGKAPKLLIYG |
| 299 | | VSSLQSGVPSRFSGSGSGTDFTLTISSLQPEDFATYYCQQSHSTPFTFGGG |
| | | TKVEIK |
| ILIRL2- | 2260 | DIQMTQSPSSLSASVGDRVTITCRTSQSISSYLNWYQQKPGKAPKLLIYA |
| 300 | | ASSLQSGVPSRFSGSGSGTDFTLTISSLQPEDFATYYCQQSYNIPYTFGQG |
| | | TKVEIK |
| ILIRL2- | 2261 | DIQMTQSPSSLSASVGDRVTITCRASQSVSYYLNWYQQKPGKAPKLLIYG |
| 301 | | AVNLQSGVPSRFSGSGSGTDFTLTISSLQPEDFATYYCQQSHTIPYTFGQG |
| | | TKVEIK |
| IL1RL2- | 2262 | DIQMTQSPSSLSASVGDRVTITCRASQRISNYLHWYQQKPGKAPKLLIYA |
| 302 | | ASRLHSGVPSRFSGSGSGTDFTLTISSLQPEDFATYYCQQSHTIPYTFGQG |
| | | TKVEIK |
| IL1RL2- | 2263 | DIQMTQSPSSLSASVGDRVTITCRTSQSISSYLNWYQQKPGKAPKLLIYA |
| 303 | | ASSLQSGVPSRFSGSGSGTDFTLTISSLQPEDFATYYCQQSYNIPYTFGGG |
| | | TKVEIK |
| IL1RL2- | 2264 | DIQMTQSPSSLSASVGDRVTITCRASQKITSYLNWYQQKPGKAPKLLIYG |
| 304 | | ATRLQSGVPSRFSGSESGTDFTLTISSLQPEDFATYYCQQSFNTPRTFGGG |
| | | TKVEIK |
| IL1RL2- | 2265 | DIQMTQSPSSLSASVGDRVTITCRASQNIGNYLNWYQQKPGKAPKLLIYG |
| 305 | | ASRLQGGVPSRFSGSGSGTDFTLTISSLQPEDFATYYCQQSYSTPSLTFGG |
| | | GTKVEIK |
| ILIRL2- | 2266 | DIQMTQSPSSLSASVGDRVTITCRASQSIGIHLNWYQQKPGKAPKLLIYG |
| 306 | | ASRLQSGVPSRFSGSGSGTDFTLTISSLQPEDFATYYCQQSYTTPVTFGGG |
| | | TKVEIK |
| ILIRL2- | 2267 | DIQMTQSPSSLSASVGDRVTITCRASQSITRYLNWYQQKPGKAPKLLIYA |
| 307 | | TSSLQSGVPSRFSGSGSGTDFTLTISSLQPEDFATYYCQQSFSTPWTFGGG |
| | | TKVEIK |
| ILIRL2- | 2268 | DIQMTQSPSSLSASVGDRVTITCRASQTINTYLNWYQQKPGKAPKLLIYG |
| 308 | | AFNLQSGVPSRFSGSGSGTDFTLTISSLQPEDFATYYCQQSSITPLTFGGGT |
| | | KVEIK |
| ILIRL2- | 2269 | DIQMTQSPSSLSASVGDRVTITCRASQSISSYVNWYQQKPGKAPKLLIYG |
| 309 | | AFRLQSGVPSRFSGSGSGTDFTLTISSLQPEDFATYYCQQTYSSPFTFGGG |
| | | TKVEIK |
| IL1RL2- | 2270 | DIQMTQSPSSLSASVGDRVTITCRASQRITSYLNWYQQKPGKAPKLLIYG |
| 310 | | GSRLQSGVPSRFSGSGSGTDFTLTISSLQPEDFATYYCQQSYSSPITFGGGT |
| | | KVEIK |
| ILIRL2- | 2271 | DIQMTQSPSSLSASVGDRVTITCRASQSIGNYVNWYQQKPGKAPKLLIYA |
| 311 | | ASNLEDGVPSRFSGSGSGTDFTLTISSLQPEDFATYYCQQSYNTPLTFGGG |
| | | TKVEIK |
| ILIRL2- | 2272 | DIQMTQSPSSLSASVGDRVTITCRASQSIRTYINWYQQKPGKAPKLLIYSA |
| 312 | | SSLRSGVPSRFSGSGSGTDFALTISSLQPEDFATYYCLQTYSTPYTFGGGT |
| | | KVEIK |
| ILIRL2- | 2273 | DIQMTQSPSSLSASVGDRVTVTCRASQTIYSHLNWYQQKPGKAPKLLIY |
| 313 | | GASILRSGVPSRFSGSGSGTDFTLTISSLQPEDFATYYCQQTYSAPFTFGG |
| | | GTKVEIK |
| ILIRL2- | 2274 | DIQMTQSPSSLSASVGDRVTITCRASQSISSYVSWYQQKPGKAPKLLIYR |
| 314 | | ASRLQSGVPSRFSGSGSGTDFTLTISSLQPEDFATYYCQQSYSSPWTFGGG |
| | | TKVEIK |
| ILIRL2- | 2275 | DIQMTQSPSSLSASVGDRVTITCRASQIINTYLNWYQQKPGKAPKLLIYA |
| 315 | | ASRLQSGVPSRFSGSGSGTDFTLTISSLQPEDFATYYCQQTYITPPTFGGG |
| | | TKVEIK |
| ILIRL2- | 2276 | DIQMTQSPSSLSASVGDRVTITCRASLSISRYLNWYQQKPGKAPKLLIYT |
| 316 | | ASSLHSGVPSRFSGSGSGTDFTLTISSLQPEDFATYYCQQSYRTPPWTFGG |
| | | GTKVEIK |
| ILIRL2- | 2277 | DIQMTQSPSSLSASVGDRVTITCRASLSISRYLNWYQQKPGKAPKLLIYT |
| 317 | | ASSLHSGVPSRFSGSGSGTDFTLTISSLQPEDFATYYCQQSYRTPPWTFGG |
| | | GTKVEIK |
| ILIRL2- | 2278 | DIQMTQSPSSLSASVGDRVTITCRASQTIGEYLNWYQQKPGKAPKLLIYA |
| 318 | | ASRLLSGVPSRFSGSGSGTDFTLTISSLQPEDFATYYCQQSYVTPPTFGGG |
| | | TKVEIK |
| ILIRL2- | 2279 | DIQMTQSPSSLSASVGDRVTITCRASQSIRTYLNWYQQKPGKAPKLLIYG |
| 319 | | ASRLESGVPSRFSGSGSGTDFTLTISSLQPEDFATYYCQHSYSTRYTFGGG |
| | | TKVEIK |
| ILIRL2- | 2280 | DIQMTQSPSSLSASVGDRVTITCRASQRISDYLHWYQQKPGKAPKLLIYG |
| 320 | | ATRLQSGVPSRFSGSGSGTDFTLTISSLQPEDFATYYCQQSHSTPTFGGGT |
| | | KVEIK |
| ILIRL2- | 2281 | DIQMTQSPSSLSASVGDRVTITCRASLSISRYLNWYQQKPGKAPKLLIYT |
| 321 | | ASSLHSGVPSRFSGSGSGTDFTLTISSLQPEDFATYYCQQSYRIPRTFGGG |
| | | TKVEIK |
| ILIRL2- | 2282 | DIQMTQSPSSLSASVGDRVTITCRASQSISSYLDWYQQKPGKAPKLLIYG |
| 322 | | TSRLQNGVPSRFSGSGSGTDFTLTISSLQPEDFATYYCQQSFSSPYTFGGG |
| | | TKVEIK |
| ILIRL2- | 2283 | DIQMTQSPSSLSASVGDRVTITCRASQSVSIYLNWYQQKPGKAPKLLIYG |
| 323 | | ASSLQGGVPSRFSGSGSGTDFTLTISSLQPEDFATYYCQQSYSDLTFGGGT |
| | | KVEIK |
| ILIRL2- | 2284 | DIQMTQSPSSLSASVGDRVTITCRASQRISDYLHWYQQKPGKAPKLLIYG |
| 324 | | ATRLQSGVPSRFSGSGSGTDFTLTISSLQPEDFATYYCQQSHSTPTFGGGT |
| | | KVEIK |
| ILIRL2- | 2285 | DIQMTQSPSSLSASVGDRVTITCRASQRIGTYLNWYQQKPGKAPKLLIYA |
| 325 | | ASSLHSGVPSRFSGSGSGTDFTLTISSLQPEDFATYYCQQSYQLPPRTFGG |
| | | GTKVEIK |
| ILIRL2- | 2286 | DIQMTQSPSSLSASVGDRVTITCRASQSINKYLNWYQQKPGKAPKLLIYG |
| 326 | | ASRLESGVPSRFSGSGSGTDFTLTISSLQPEDFATYYCQQSYSTSRTFGGG |
| | | TKVEIK |
| ILIRL2- | 2287 | DIQMTQSPSSLSASVGDRVTITCRASESINRYLNWYQQKPGKAPKLLIYA |
| 327 | | TSRLESGVPSRFSGSGSGTDFTLTISSLQPEDFATYYCQQTYSLPYTFGGG |
| | | TKVEIK |
| ILIRL2- | 2288 | DIQMTQSPSSMSASVGDRVTITCRASQSIFSYLNWYQQKPGKAPKLLIYS |
| 328 | | ASNLQSGVPSRFSGSGSGTDFTLTISSLQPEDFATYYCQQSYRTPQTFGGG |
| | | TKVEIK |
| ILIRL2- | 2289 | DIQMTQSPSSLSASVGDRVTITCRASLSISRYLNWYQQKPGKAPKLLIYT |
| 329 | | ASSLHSGVPSRFSGSGSGTDFTLTISSLQPEDFATYYCQQSYRTPPWTFGG |
| | | GTKVEIK |
| IL1RL2- | 2290 | DIQMTQSPSSLSASVGDRVTITCRASQUISRYLNWYQQKPGKAPKLLIYDT |
| 330 | | SNLQSGVPSRFSGSGSGTDFTLTISSLQPEDFATYYCQQSYDTPYTFGGGT |
| | | KVEIK |
| ILIRL2- | 2291 | DIQMTQSPSSLSASVGDRVTITCRASQSIGAYLNWYQQKPGKAPKLLIYS |
| 331 | | SSSLQSGVPSRFSGSGSGTDFTLTISSLQPEDFATYYCQQGYNTPYTFGGG |
| | | TKVEIK |
| ILIRL2- | 2292 | DIQMTQSPSSLSASVGDRVTITCQTSQSVSSYLNWYQQKPGKAPKLLIYA |
| 332 | | ASTLASGVPSRFSGSGSGTDFTLTISSLQPEDFATYYCQQSYITPITFGGGT |
| | | KVEIK |
| ILIRL2- | 2293 | DIQMTQSPSSLSASVGDRVTITCRASQTIGEYLNWYQQKPGKAPKLLIYG |
| 333 | | ATRLHSGVPSRFSGSGSGTDFTLTISSLQPEDFATYYCQQSFSFPLTFGGG |
| | | TKVEIK |
| ILIRL2- | 2294 | DIQMTQSPSSLSASVGDRVTITCRASQUIGNYLNWYQQKPGKAPKLLIYA |
| 334 | | ASTLETGVPSRFSGSGSGTDFTLTISSLQPEDFATYYCQQTSSTPFTFGGGT |
| | | KVEIK |
| ILIRL2- | 2295 | DIQMTQSPSSLSASVGDRVTITCRTSQSISNLLHWYQQKPGKAPKLLIYA |
| 335 | | ASILPSGVPSRFSGSGSGTDFTLTISSLQPEDFATYYCQHRGTFGGGTKVEI |
| | | K |
| IL1RL2- | 2296 | DIQMTQSPSSLSASVGDRVTITCRASQSIDTNLNWYQQKPGKAPKLLIYA |
| 336 | | VSNLQHGVPSRFSGSGSGTDFTLTISSLQPEDFATYYCQQSSSIPLTFGGG |
| | | TKVEIK |
| IL 1RL2- | 2297 | DIQMTQSPSSLSASVGDRVTITCRASQSVSRYLNWYQQKPGKAPKLLIYA |
| 337 | | TSSLQTGVPSRFSGSGSGTDFTLTISSLQPEDFATYYCQQSYRTPYTFGGG |
| | | TKVEIK |
| ILIRL2- | 2298 | DIQMTQSPSSLSASVGDRVTITCRASQSIRSYLNWYQQKPGKAPKLLIYT |
| 338 | | ASTLQPGVPSRFSGSGSGTDFTLTISSLQPEDFATYYCLQTYSTSFTFGGG |
| | | TKVEIK |
| ILIRL2- | 2299 | DIQMTQSPSSLSASVGDRVTITCRASQSIRTSLNWYQQRPGKAPKLLIYG |
| 339 | | AFTLQSGVPSRFSGSGSGTDFTLTISSLQPEDFATYYCQQSYSGFTFGGGT |
| | | KVEIK |
| ILIRL2- | 2300 | DIQMTQSPSSLSASVGDRVTITCRASQTISTYLNWYQQKPGKAPKLLIYG |
| 340 | | ASNLQNGVPSRFSGSGSGTDFTLTISSLQPEDFATYYCQQSYSLPHTFGGG |
| | | TKVEIK |
| IL1RL2- | 2301 | DIQMTQSPSSLSASVGDRVTITCRASQRISDYLHWYQQKPGKAPKLLIYG |
| 341 | | ATRLQSGVPSRFSGSGSGTDFTLTISSLQPEDFATYYCQQSHSTPTFGGGT |
| | | KVEIK |
| ILIRL2- | 2302 | DIQMTQSPSSLSASVGDRVTITCRTSQGIRSHLNWYQQKPGKAPKLLIYA |
| 342 | | ATRLQSGVPSRFSGSGSGTDFTLTISSLQPEDFATYYCQQTYSPPPDFGGG |
| | | TKVEIK |
| ILIRL2- | 2303 | DIQMTQSPSSLSASVGDRVTITCRASQDISTYLNWYQQKPGKAPKLLIYG |
| 343 | | ASSLLSGVPSRFSGSGSGTDFTLTISSLQPEDFATYYCHQSYSVPYTFGGG |
| | | TKVEIK |
| ILIRL2- | 2304 | DIQMTQSPSSLSASVGDRVTITCRASQSIDTNLNWYQQKPGKAPKLLIYA |
| 344 | | ASNLQHGVPSRFSGSGSGTDFTLTISSLQPEDFATYYCQQSSSIPLTFGGG |
| | | TKVEIK |
| ILIRL2- | 2305 | DIQMTQSPSSLSASVGDRVTITCRASQRIGTYLNWYQQKPGKAPKLLIYG |
| 345 | | ASSLRSGVPSRFSGSGSGTDFTLTISSLQPEDFATYYCQQSYSGPRTFGGG |
| | | TKVEIK |
| ILIRL2- | 2306 | DIQMTQSPSSLSASVGDRVTITCRASQTIGTYLNWYQQKPGKAPKLLIYG |
| 346 | | GSRLQSGVPSRFSGSGSGTDFTLTISSLQPEDFATYYCQQSYSTPYTFGGG |
| | | TKVEIK |
| ILIRL2- | 2307 | DIQMTQSPSSLSASVGDRVTITCRASLSISRYLNWYQQKPGKAPKLLIYT |
| 347 | | ASSLHSGVPSRFSGSGSGTDFTLTISSLQPEDFATYYCQQSYRTPPWTFGG |
| | | GTKVEIK |
| ILIRL2- | 2308 | DIQMTQSPSSMSASVGDRVTITCRASESIGIYLNWYQQKPGKAPKLLIYD |
| 348 | | ASNLQSGVPSRFSGSGSGTDFTLTISSLQPEDFATYYCQQSYSVPLTFGGG |
| | | TKVEIK |
| ILIRL2- | 2309 | DIQMTQSPSSLSASVGDRVTITCRASLSISRYLNWYQQKPGKAPKLLIYT |
| 349 | | ASSLHSGVPSRFSGSGSGTDFTLTISSLQPEDFATYYCQQSYRTPPWTFGG |
| | | GTKVEIK |
| IL1RL2- | 2310 | DIQMTQSPSSLSASVGDRVTITCRPSQSISRYLNWYQQKPGKAPKLLIYG |
| 350 | | ATRLQSGVPSRFSGSGSGTDFTLTISSLQPEDFATYYCQQSYTTPLTFGGG |
| | | TKVEIK |
| ILIRL2- | 2311 | DIQMTQSPSSLSASVGDRVTITCRASQSIGSNLNWYQQKPGKAPKLLIYS |
| 351 | | ASSLQGGVPSRFSGSGSGTDFTLTISSLQPEDFATYYCQQSYSPLWTFGG |
| | | GTKVEIK |
| ILIRL2- | 2312 | DIQMTQSPSSLSASVGDRVTITCRASQTIYSYLNWYQQKPGKAPKLQIYA |
| 352 | | ASILQSGVPSRFSGSGSGTDFTLTISSLQPEDFATYYCQQSFSLPPTFGGGT |
| | | KVEIK |
| ILIRL2- | 2313 | DIQMTQSPSSLSASVGDRVTITCRASQSISVHLNWYQQKPGKAPKLLIYIA |
| 353 | | SNLQSGVPSRFSGSGSGTDFTLTISSLQPEDFATYYCQQTYTTPYTFGGGT |
| | | KVEIK |
| ILIRL2- | 2314 | DIQMTQSPSSLSASVGDRVTITCRASQSISRSLSWYQQKPGKAPKLLIYGA |
| 354 | | SNLQSGVPSRFSGSGSGTDFTLTISSLQPEDFATYYCQQSYSPPLTFGGGT |
| | | KVEIK |
| ILIRL2- | 2315 | DIQMTQSPSSLSASVGDRVTITCRASQSIGTYLNWYQQKPGKAPKLLIYT |
| 355 | | ASKLHSGVPSRFSGSGSGTDFTLTISSLQPEDFATYYCQQSYTTPRSFGGG |
| | | TKVEIK |
| ILIRL2- | 2316 | DIQMTQSPSSLSASVGDRVTITCRASRSISTYLNWYQQKPGKAPKLLIYA |
| 356 | | ASSSQSGVPSRFSGSGSGTDFTLTISSLQPEDFATYYCQQSYRTPPWTFGG |
| | | GTKVEIK |
| ILIRL2- | 2317 | DIQMTQSPSSLSASVGDRVTITCRASQNIVRYLNWYQQKPGKAPKLLIYR |
| 357 | | ASTLRSGVPSRFSGSGSGTDFTLTISSLQPEDFATYYCQQSYSAPITFGGGT |
| | | KVEIK |
| IL1RL2- | 2318 | DIQMTQSPSSLSASVGDRVTITCRASQSVSYYLNWYQQKPGKAPKLLIYG |
| 358 | | AVNLQSGVPSRFSGSGSGTDFTLTISSLQPEDFATYYCQQSHTIPYTFGGG |
| | | TKVEIK |
| ILIRL2- | 2319 | DIQMTQSPSSLSASVGDRVTITCRTSQSISTYLNWYQQKPGKAPKLLIYA |
| 359 | | ASRLRSGVPSRFSGSGSGTDFTLTISSLQPEDFATYYCQQSYETPLTFGGG |
| | | TKVEIK |
| ILIRL2- | 2320 | DIQMTQSPSSLSASVGDRVTITCRASQSVSYYLNWYQQKPGKAPKLLIYG |
| 360 | | AVNLQSGVPSRFSGSGSGTDFTLTISSLQPEDFATYYCQQSHTIPYTFGGG |
| | | TKVEIK |
| ILIRL2- | 2321 | DIQMTQSPSSLSASVGDRVTITCRASQSVSSYLSWYQQKPGKAPKLLIYD |
| 361 | | TSNLQSGVPSRFSGSGSGTDFTLTISSLQPEDFATYYCQRSYSTPRTFGGG |
| | | TKVEIK |
| ILIRL2- | 2322 | DIQMTQSPSSLSASVGDRVTITCRASQSISVHLNWYQQKPGKAPKLLIYIA |
| 362 | | SNLQSGVPSRFSGSGSGTDFTLTISSLQPEDFATYYCQQTYTTPYTFGGGT |
| | | KVEIK |
| ILIRL2- | 2323 | DIQMTQSPSSLSASVGDRVTITCRASQSVSRYLNWYQQKPGKAPKLLIYD |
| 363 | | ASSLESGVPSRFSGSGSGTDFTLTISSLQPEDFATYYCQQSYSTPTTFGGG |
| | | TKVEIK |
| ILIRL2- | 2324 | DIQMTQSPSSLSASVGDRVTITCRASQSVSSYLNWYQQKPGKAPKLLIYG |
| 364 | | TSRLQTGVPSRFSGSGSGTDFTLTISSLQPEDFATYYCQQSSSTPYTFGGG |
| | | TKVEIK |
| ILIRL2- | 2325 | DIQMTQSPSSLSASVGDRVTITCRASQSVSYYLNWYQQKPGKAPKLLIYG |
| 365 | | AVNLQSGVPSRFSGSGSGTDFTLTISSLQPEDFATYYCQQSHTIPYTFGGG |
| | | TKVEIK |
| ILIRL2- | 2326 | DIQMTQSPSSLSASVGDRVTITCRASQTIGTYLNWYQQKPGKAPKLLIYG |
| 366 | | GSRLQSGVPSRFSGSGSGTDFTLTISSLQPEDFATYYCQQSYSTPYTFGGG |
| | | TKVEIK |
| ILIRL2- | 2327 | DIQMTQSPSSLSASVGDRVTITCRASLSISRYLNWYQQKPGKAPKLLIYT |
| 367 | | ASSLHSGVPSRFSGSGSGTDFTLTISSLQPEDFATYYCQQSYRTPPWTFGG |
| | | GTKVEIK |
| ILIRL2- | 2328 | DIQMTQSPSSLSASVGDRVTITCRASQNINRYLNWYQQKPGKAPKLLIYG |
| 368 | | ASHLQSGVPSRFSGSGSGTDFALTISSLQPEDFATYYCQQTYRTPITFGGG |
| | | TKVEIK |
| ILIRL2- | 2329 | DIQMTQSPSSLSASVGDRVTITCRASQSIRSYLNWYQQKPGKAPKLLIYT |
| 369 | | ASTLQRGVPSRFSGSGSGTDFTLTISSLQPEDFATYYCQQSSITPLTFGGGT |
| | | KVEIK |
| ILIRL2- | 2330 | DIQMTQSPSSLSASVGDRVTITCRASQSVSYYLNWYQQKPGKAPKLLIYG |
| 370 | | AVNLQSGVPSRFSGSGSGTDFTLTISSLQPEDFATYYCQQSFSTPWTFGG |
| | | GTKVEIK |
| ILIRL2- | 2331 | DIQMTQSPSSLSASVGDRVTITCRPSQSISRYLNWYQQKPGKAPKLLIYGI |
| 371 | | SNLQSGVPSRFSGSGSGTDFTLTISSLQPEDFATYYCQQGYNTPYTFGGG |
| | | TKVEIK |
| ILIRL2- | 2332 | DIQMTQSPSSLSASVGDRVTITCRASQSIDTNLNWYQQKPGKAPKLLIYA |
| 372 | | ASNLQHGVPSRFSGSGSGTDFTLTISSLQPEDFATYYCQQSSSIPLTFGGG |
| | | TKVEIK |
| IL1RL2- | 2333 | DIQMTQSPSSLSASVGDRVTITCRASQSIDTNLNWYQQKPGKAPKLLIYA |
| 373 | | ASNLQHGVPSRFSGSGSGTDFTLTISSLQPEDFATYYCQQSSSIPLTFGGG |
| | | TKVEIK |
| ILIRL2- | 2334 | DIQMTQSPSSLSASVGDRVTITCRASQTISTYLNWYQQKPGKAPKLLIYG |
| 374 | | ASNLQNGVPSRFSGSGSGTDFTLTISSLQPEDFATYYCQQSYSLPHTFGGG |
| | | TKVEIK |
| ILIRL2- | 2335 | DIQMTQSPSSLSASVGDRVTITCRASQSIGNYVNWYQQKPGKAPKLLIYT |
| 375 | | ASTLQTGVPSRFSGSGSGTDFTLTISSLQPEDFATYYCQQSYGTPLTFGGG |
| | | TKVEIK |
| ILIRL2- | 2336 | DIQMTQSPSSLSASVGDRVTITCRASQTISTYLNWYQQKPGKAPKLLIYG |
| 376 | | ASNLQNGVPSRFSGSGSGTDFTLTISSLQPEDFATYYCQQSYSLPHTFGGG |
| | | TKVEIK |
| ILIRL2- | 2337 | DIQMTQSPSSLSASVGDRVTITCRASQSIGYYLNWYQQKPGKAPKLLIYS |
| 377 | | ATSLQSGVPSRFSGSGSGTDFTLTISSLQPEDFATYYCQHRGTFGGGTKV |
| | | EIK |
| ILIRL2- | 2338 | DIQMTQSPSSLSASVGDRVTITCRASQRISDYLHWYQQKPGKAPKLLIYG |
| 378 | | ATRLQSGVPSRFSGSGSGTDFTLTISSLQPEDFATYYCQQSHSTPTFGGGT |
| | | KVEIK |
| ILIRL2- | 2339 | DIQMTQSPSSLSASVGDRVTITCRASQRISDYLHWYQQKPGKAPKLLIYG |
| 379 | | ATRLQSGVPSRFSGSGSGTDFTLTISSLQPEDFATYYCQQSHSTPTFGGGT |
| | | KVEIK |
| ILIRL2- | 2340 | DIQMTQSPSSLSASVGDRVTITCRASETISNYLNWYQQKPGKAPKLLIYR |
| 380 | | ASRLQSGVPSRFSGSGSGTDFTLTISSLQPEDFATYYCQQSFTTPWTFGGG |
| | | TKVEIK |
| ILIRL2- | 2341 | DIQMTQSPSSLSASVGDRVTITCRASQSITNYLNWYQQKPGKAPKLLIYR |
| 381 | | ASTLQTGVPSRFSGSGSGTDFTLTISSLQPEDFATYYCQQTYSIPWTFGGG |
| | | TKVEIK |
| ILIRL2- | 2342 | DIQMTQSPSSLSASVGDRVTITCRASQSISSYLNWYQQKPGKAPKLLIYSA |
| 382 | | SKLQSGVPSRFSGSGSGTDFTLTISSLQPEDFATYYCQQSYSTPFTFGGGT |
| | | KVEIK |
| ILIRL2- | 2343 | DIQMTQSPSSLSASVGDRVTITCRASLSISRYLNWYQQKPGKAPKLLIYT |
| 383 | | ASSLHSGVPSRFSGSGSGTDFTLTISSLQPEDFATYYCQQSYRTPPWTFGG |
| | | GTKVEIK |
| IL1RL2- | 2344 | DIQMTQSPSSLSASVGDRVTITCRASQSIGYYLNWYQQKPGKAPKLLIYS |
| 384 | | ATSLQSGVPSRFSGSGSGTDFTLTISSLQPEDFATYYCQHRGTFGGGTKV |
| | | EIK |
| ILIRL2- | 2345 | DIQITQSPSSLSASVGDRVTITCQASQSISKSLNWYQQKPGKAPKLLIYGA |
| 385 | | STLLSGVPSRFSGSGSGTDFTLTISSLQPEDFATYYCQQSFRTPLTFGGGT |
| | | KVEIK |
| ILIRL2- | 2346 | DIQMTQSPSSLSASVGDRVTITCRASQIIGTYLNWYQQKPGKAPKLLIYSA |
| 386 | | SSLHTGVPSRFSGSGSGTDFTLTISSLQPEDFATYYCQQTYRIPYTFGGGT |
| | | KVEIK |
| ILIRL2- | 2347 | DIQMTQSPSSLSASVGDRVTITCRASQRISDYLHWYQQKPGKAPKLLIYG |
| 387 | | ATRLQSGVPSRFSGSGSGTDFTLTISSLQPEDFATYYCQQSHSTPTFGGGT |
| | | KVEIK |
| ILIRL2- | 2348 | DIQMTQSPSSLSASVGDRVTITCRASLSISRYLNWYQQKPGKAPKLLIYT |
| 388 | | ASSLHSGVPSRFSGSGSGTDFTLTISSLQPEDFATYYCQQSYRTPPWTFGG |
| | | GTKVEIK |
| IL1RL2- | 2349 | DIQMTQSPSSLSASVGDRVTITCRASQSIDTNLNWYQQKPGKAPKLLIYA |
| 389 | | ASNLQHGVPSRFSGSGSGTDFTLTISSLQPEDFATYYCQQSSSIPLTFGGG |
| | | TKVEIK |
| ILIRL2- | 2350 | DIQMTQSPSSLSASVGDRVTITCRASQTISTYLNWYQQKPGKAPKLLIYG |
| 390 | | ASNLQNGVPSRFSGSGSGTDFTLTISSLQPEDFATYYCQQSYSLPHTFGGG |
| | | TKVEIK |
| IL1RL2- | 2351 | DIQMTQSPSSLSASVGDRVTITCRASQSISRYLSWYQQKPGKAPKLLIYG |
| 391 | | ATSLHSGVPSRFSGSGSGTDFTLTISSLQPEDFATYYCQQTYSLPLTFGGG |
| | | TKVEIK |
| ILIRL2- | 2352 | DIQMTQSPSSLSASVGDRVTITCRASLSISRYLNWYQQKPGKAPKLLIYT |
| 392 | | ASSLHSGVPSRFSGSGSGTDFTLTISSLQPEDFATYYCQQSYRTPPWTFGG |
| | | GTKVEIK |
| ILIRL2- | 2353 | DIQMTQSPSSLSASVGDRVTITCRASRRISTYLNWYQQKPGKAPKLLIYG |
| 393 | | ASNLHSGVPSRFSGSGSGTDFTLTISSLQPEDFATYYCQQSFSTPYTFGGG |
| | | TKVEIK |
| ILIRL2- | 2354 | DIQMTQSPSSLSASVGDRVTITCRASQSIGIHLNWYQQKPGKAPKLLIYG |
| 394 | | ASRLQSGVPSRFSGSGSGTDFTLTISSLQPEDFATYYCQQSYTTPVTFGGG |
| | | TKVEIK |
| IL1RL2- | 2355 | DIQMTQSPSSLSASVGDRVTITCRASQTISTYLNWYQQKPGKAPKLLIYG |
| 395 | | ASNLQNGVPSRFSGSGSGTDFTLTISSLQPEDFATYYCQQSYSLPHTFGGG |
| | | TKVEIK |
| ILIRL2- | 2356 | DIQMTQSPSSLSASVGDRVTITCRASQRISDYLHWYQQKPGKAPKLLIYG |
| 396 | | ATRLQSGVPSRFSGSGSGTDFTLTISSLQPEDFATYYCQQSHSTPTFGGGT |
| | | KVEIK |
| ILIRL2- | 2357 | DIQMTQSPSSLSASVGDRVTITCRASQSIGIYLNWYQQKPGKAPKLLIYG |
| 397 | | VSSLHSGVPSRFSGSGSGTDFTLTISSLQPEDFATYYCQQTYSTPFTFGGG |
| | | TKVEIK |

TABLE 15
CD40L Variable Light Chain Domain Sequences

| CD40L | SEQ ID | |
|---|---|---|
| Variant | NO | VL Sequence |
| CD40L- | 2358 | DIQMTQSPSSLSASVGDRVTITCRASQPIGPDLLWYQQKPGKAPKLLIYD |
| 156 | | NTNRPSGVPSRFSGSGSGTDFTLTISSLQPEDFATYYCQQSQAAPLTFGQG |
| | | TKVEIK |
| CD40L- | 2359 | DIQMTQSPSSLSASVGDRVTITCRASQDVSSGVAWYQQKPGKAPKLLIYE |
| 157 | | DTKRPSGVPSRFSGSGSGTDFTLTISSLOPEDFATYYCQQTYSPPLTFGQG |
| | | TKVEIK |
| CD40L- | 2360 | DIQMTQSPSSLSASVGDRVTITCRASQDVSSGVAWYQQKPGKAPKLLIY |
| 158 | | QMSHLASGVPSRFSGSGSGTDFTLTISSLQPEDFATYYCSSQDTVTRVLG |
| | | QGTKVEIK |
| CD40L- | 2361 | DIQMTQSPSSLSASVGDRVTITCRASQDISNYLNWYQQKPGKAPKLLIYG |
| 159 | | KKNRPSGVPSRFSGSGSGTDFTLTISSLQPEDFATYYCQQGYTRTDIDNTF |
| | | GQGTKVEIK |
| CD40L- | 2362 | DIQMTQSPSSLSASVGDRVTITCRASQDVSSGVAWYQQKPGKAPKLLIY |
| 160 | | GKKNRPSGVPSRFSGSGSGTDFTLTISSLQPEDFATYYCQAWDRDTGVFG |
| | | QGTKVEIK |
| CD40L- | 2363 | DIQMTQSPSSLSASVGDRVTITCRASQDVSSGVAWYQQKPGKAPKLLIY |
| 161 | | ATSTLQSGVPSRFSGSGSGTDFTLTISSLQPEDFATYYCQQSFSVPAFGQG |
| | | TKVEIK |
| CD40L- | 2364 | DIQMTQSPSSLSASVGDRVTITCRTSQDISNYLNWYQQKPGKAPKLLIYA |
| 162 | | TSNLASGVPSRFSGSGSGTDFTLTISSLQPEDFATYYCQQSYSSAPMFGQG |
| | | TKVEIK |
| CD40L- | 2365 | DIQMTQSPSSLSASVGDRVTITCSGDRLGEKYVSWYQQKPGKAPKLLIY |
| 163 | | QDFKRPSGVPSRFSGSGSGTDFTLTISSLQPEDFATYYCQQPWRSPGTFGQ |
| | | GTKVEIK |
| CD40L- | 2366 | DIQMTQSPSSLSASVGDRVTITCRASSSVSYMHWYQQKPGKAPKLLIYA |
| 164 | | ASDLESGVPSRFSGSGSGTDFTLTISSLQPEDFATYYCSQSTHVPTFGQGT |
| | | KVEIK |
| CD40L- | 2367 | DIQMTQSPSSLSASVGDRVTITCRTSQDISNYLNWYQQKPGKAPKLLIYG |
| 165 | | ASTLQSGVPSRFSGSGSGTDFTLTISSLQPEDFATYYCQQSYDNPLTFGQG |
| | | TKVEIK |
| CD40L- | 2368 | DIQMTQSPSSLSASVGDRVTITCRASQSIISYVNWYQQKPGKAPKLLIYG |
| 166 | | ASNLHSGVPSRFSGSGSGTDFTLTISSLQPEDFATYYCQQSYSTPTFGQGT |
| | | KVEIK |
| CD40L- | 2369 | DIQMTQSPSSLSASVGDRVTITCRASESVEYHGTSLMHWYQQKPGKAPK |
| 167 | | LLIYGTSNLESGVPSRFSGSGSGTDFTLTISSLQPEDFATYYCQQVVWRPF |
| | | TFGQGTKVEIK |
| CD40L- | 2370 | DIQMTQSPSSLSASVGDRVTITCSGDNLGDKYVHWYQQKPGKAPKLLIY |
| 168 | | GKNIRPSGVPSRFSGSGSGTDFTLTISSLQPEDFATYYCQSGSSSANAVFG |
| | | QGTKVEIK |
| CD40L- | 2371 | DIQMTQSPSSLSASVGDRVTITCSGDKLGDKYAYWYQQKPGKAPKLLIY |
| 169 | | FTSTLAAGVPSRFSGSGSGTDFTLTISSLQPEDFATYYCQQSYSSAPTFGQ |
| | | GTKVEIK |
| CD40L- | 2372 | DIQMTQSPSSLSASVGDRVTITCRASQDVSSGVAWYQQKPGKAPKLLIY |
| 170 | | QMSHLASGVPSRFSGSGSGTDFTLTISSLQPEDFATYYCSSQDTVTRVLG |
| | | QGTKVEIK |
| CD40L- | 2373 | DIQMTQSPSSLSASVGDRVTITCRASSSVSYMHWYQQKPGKAPKLLIYQ |
| 171 | | NDKRPSGVPSRFSGSGSGTDFTLTISSLQPEDFATYYCQQHYSPSHTFGQG |
| | | TKVEIK |
| CD40L- | 2374 | DIQMTQSPSSLSASVGDRVTITCKASQHVITHVTWYQQKPGKAPKLLIYG |
| 172 | | TSDLQSGVPSRFSGSGSGTDFTLTISSLQPEDFATYYCQQSNSWPYTFGQ |
| | | GTKVEIK |
| CD40L- | 2375 | DIQMTQSPSSLSASVGDRVTITCQSSQSVYSNNELSWYQQKPGKAPKLLI |
| 173 | | YGRNKRPSGVPSRFSGSGSGTDFTLTISSLQPEDFATYYCSQGTHVPPTFG |
| | | QGTKVEIK |
| CD40L- | 2376 | DIQMTQSPSSLSASVGDRVTITCRASESVEYHGTSLMHWYQQKPGKAPK |
| 174 | | LLIYGRNKRPSGVPSRFSGSGSGTDFTLTISSLQPEDFATYYCQAWDRDT |
| | | GVFGQGTKVEIK |
| CD40L- | 2377 | DIQMTQSPSSLSASVGDRVTITCRASQTIGDYLNWYQQKPGKAPKLLIYD |
| 175 | | ASNLQSGVPSRFSGSGSGTDFTLTISSLQPEDFATYYCQQSYELPLTFGQG |
| | | TKVEIK |
| CD40L- | 2378 | DIQMTQSPSSLSASVGDRVTITCRTSQDIGNYLNWYQQKPGKAPKLLIYG |
| 176 | | ENSRPSGVPSRFSGSGSGTDFTLTISSLQPEDFATYYCQQSYSFPLTFGQG |
| | | TKVEIK |
| CD40L- | 2379 | DIQMTQSPSSLSASVGDRVTITCRASQDVSSGVAWYQQKPGKAPKLLIY |
| 177 | | DASNLQSGVPSRFSGSGSGTDFTLTISSLQPEDFATYYCSQSTRVPPTFGQ |
| | | GTKVEIK |
| CD40L- | 2380 | DIQMTQSPSSLSASVGDRVTITCRASQPIVRNLRWYQQKPGKAPKLLIYG |
| 178 | | ASSLESGVPSRFSGSGSGTDFTLTISSLQPEDFATYYCLQNVANPATFGQG |
| | | TKVEIK |
| CD40L- | 2381 | DIQMTQSPSSLSASVGDRVTITCRASQSILSYLNWYQQKPGKAPKLLIYG |
| 179 | | TSKLASGVPSRFSGSGSGTDFTLTISSLQPEDFATYYCQSYDNDFYGTVFG |
| | | QGTKVEIK |
| CD40L- | 2382 | DIQMTQSPSSLSASVGDRVTITCRASQSILSYLNWYQQKPGKAPKLLIYG |
| 180 | | ASSLESGVPSRFSGSGSGTDFTLTISSLQPEDFATYYCQQTYDTPLTFGQG |
| | | TKVEIK |
| CD40L- | 2383 | DIQMTQSPSSLSASVGDRVTITCRASQSIVTYLNWYQQKPGKAPNLLIYH |
| 181 | | TSRLQSGVPSRFSGSGSGTDFTLTISSLQPEDFATYYCQQGPGTPNTFGQG |
| | | TKVEIK |
| CD40L- | 2384 | DIQMTQSPSSLSASVGDRVTITCSGDNLGDKYVHWYQQKPGKAPKLLIY |
| 182 | | GKKNRPSGVPSRFSGSGSGTDFTLTISSLQPEDFATYYCQAWDRTVVFGQ |
| | | GTKVEIK |
| CD40L- | 2385 | DIQMTQSPSSLSASVGDRVTITCTGDKLAEKYVSWYQQKPGKAPKLLIY |
| 183 | | QNDKRPSGVPSRFSGSGSGTDFTLTISSLQPEDFATYYCQQSYSRPYTFGQ |
| | | GTKVEIK |
| CD40L- | 2386 | DIQMTQSPSSLSASVGDRVTITCRASQSISSYVNWYQQKPGKAPKLLIYG |
| 184 | | KNIRPSGVPSRFSGSGSGTDFTLTISSLQPEDFATYYCQHSRDLTFPFGQG |
| | | TKVEIK |
| CD40L- | 2387 | DIQMTQSPSSLSASVGDRVTITCRASQTIERRLNWYQQKPGKAPKLLIYG |
| 185 | | TTSLESGVPSRFSGSGSGTDFTLTISSLQPEDFATYYCHHWHHNPTHHET |
| | | NVFGQGTKVEIK |
| CD40L- | 2388 | DIQMTQSPSSLSASVGDRVTITCRASQGVRTSLAWYQQKPGKAPKLLIYE |
| 186 | | NNNRPSGVPSRFSGSGSGTDFTLTISSLQPEDFATYYCSQSTHVPPTFGQG |
| | | TKVEIK |
| CD40L- | 2389 | DIQMTQSPSSLSASVGDRVTITCRASSSVSYMHWYQQKPGKAPKLLIYHT |
| 187 | | SRLQSGVPSRFSGSGSGTDFTLTISSLQPEDFATYYCSAFTHNSDVFGQGT |
| | | KVEIK |
| CD40L- | 2390 | DIQMTQSPSSLSASVGDRVTITCRASQDVSSGVAWYQQKPGKAPKLLIY |
| 188 | | GKKNRPSGVPSRFSGSGSGTDFTLTISSLQPEDFATYYCHQYESPPLKFGQ |
| | | GTKVEIK |
| CD40L- | 2391 | DIQMTQSPSSLSASVGDRVTITCSGDTLGGKYAWWYQQKPGKAPKLLIY |
| 189 | | DNTNRPSGVPSRFSGSGSGTDFTLTISSLQPEDFATYYCQAWDNSAVIFG |
| | | QGTKVEIK |
| CD40L- | 2392 | DIQMTQSPSSLSASVGDRVTITCRASQDIKNYLNWYQQKPGKAPKLLIYP |
| 190 | | KHNRPPGVPSRFSGSGSGTDFTLTISSLQPEDFATYYCQNGHSFPLTFGQG |
| | | TKVEIK |
| CD40L- | 2393 | DIQMTQSPSSLSASVGDRVTITCSGNKLGDKYASWYQQKPGKAPKLLIY |
| 191 | | DTSKVASGVPSRFSGSGSGTDFTLTISSLQPEDFATYYCQQSYETPLTFGQ |
| | | GTKVEIK |
| CD40L- | 2394 | DIQMTQSPSSLSASVGDRVTITCRTSQDISNYLNWYQQKPGKAPKLLIYG |
| 192 | | ASSRATGVPSRFSGSGSGTDFTLTISSLQPEDFATYYCQQSYSNLWTFGQ |
| | | GTKVEIK |
| CD40L- | 2395 | DIQMTQSPSSLSASVGDRVTITCSGDNLRDYIVHWYQQKPGKAPKLLIYE |
| 193 | | TSKLASGVPSRFSGSGSGTDFTLTISSLQPEDFATYYCQQGYNSNDVDNV |
| | | FGQGTKVEIK |
| CD40L- | 2396 | DIQMTQSPSSLSASVGDRVTITCRASQNINYYLNWYQQKPGKAPKLLIYQ |
| 194 | | NDKRPSGVPSRFSGSGSGTDFTLTISSLQPEDFATYYCQQSYENPLTFGQG |
| | | TKVEIK |
| CD40L- | 2397 | DIQMTQSPSSLSASVGDRVTITCSGDNIGSIYASWYQQKPGKAPKLLIYQ |
| 195 | | NDKRPSGVPSRFSGSGSGTDFTLTISSLQPEDFATYYCQQGYNSNDVDNV |
| | | FGQGTKVEIK |
| CD40L- | 2398 | DIQMTQSPSSLSASVGDRVTITCRASQGVRTSLAWYQQKPGKAPKLLIYP |
| 196 | | KHNRPPGVPSRFSGSGSGTDFTLTISSLQPEDFATYYCQQYHSYPPTFGQG |
| | | TKVEIK |
| CD40L- | 2399 | DIQMTQSPSSLSASVGDRVTITCRTSQDIGNYLNWYQQKPGKAPKLLIYY |
| 197 | | DVNRPSGVPSRFSGSGSGTDFTLTISSLQPEDFATYYCQPSFYFPYTFGQG |
| | | TKVEIK |
| CD40L- | 2400 | DIQMTQSPSSLSASVGDRVTITCRASQSVDRYFNWYQQKPGKAPKLLIY |
| 198 | | DTSKVASGVPSRFSGSGSGTDFTLTISSLQPEDFATYYCQQYGSSPLTFGQ |
| | | GTKVEIK |
| CD40L- | 2401 | DIQMTQSPSSLSASVGDRVTITCSGDNLGDKYVHWYQQKPGKAPKLLIY |
| 199 | | GASSRATGVPSRFSGSGSGTDFTLTISSLQPEDFATYYCTTRSTQGNPHVL |
| | | FGQGTKVEIK |
| CD40L- | 2402 | DIQMTQSPSSLSASVGDRVTITCRASSSVSYMHWYQQKPGKAPKLLIYG |
| 200 | | ASNLHSGVPSRFSGSGSGTDFTLTISSLQPEDFATYYCQAWDRDTGVFGQ |
| | | GTKVEIK |
| CD40L- | 2403 | DIQMTQSPSSLSASVGDRVTITCSGDNLRGYYASWYQQKPGKAPKLLIY |
| 201 | | GTSDLQSGVPSRFSGSGSGTDFTLTISSLQPEDFATYYCQAWDTNTVIFG |
| | | QGTKVEIK |
| CD40L- | 2404 | DIQMTQSPSSLSASVGDRVTITCRASQDIYQNLDWYQQKPGKAPKLLIYQ |
| 202 | | DFKRPSGVPSRFSGSGSGTDFTLTISSLQPEDFATYYCQAWDNGAAVFGQ |
| | | GTKVEIK |
| CD40L- | 2405 | DIQMTQSPSSLSASVGDRVTITCRASQSISSYVNWYQQKPGKAPKLLIYA |
| 203 | | NTNGPSGVPSRFSGSGSGTDFTLTISSLQPEDFATYYCQSYDNSVRGSRVF |
| | | GQGTKVEIK |
| CD40L- | 2406 | DIQMTQSPSSLSASVGDRVTITCSGDNLRGYYASWYQQKPGKAPKLLIY |
| 204 | | LSSDLQSGVPSRFSGSGSGTDFTLTISSLQPEDFATYYCIARSNKGNPHVL |
| | | FGQGTKVEIK |
| CD40L- | 2407 | DIQMTQSPSSLSASVGDRVTITCSGDNLGDKYVHWYQQKPGKAPKLLIY |
| 205 | | GKNIRPSGVPSRFSGSGSGTDFTLTISSLQPEDFANYYCQQTYSIPYTFGQ |
| | | GTKVEIK |
| CD40L- | 2408 | DIQMTQSPSSLSASVGDRVTITCSGDNLGDKYVHWYQQKPGKAPKLLIY |
| 206 | | AASTLQRGVPSRFSGSGSGTDFTLTISSLQPEDFATYYCAAWDFSPAIVFG |
| | | QGTKVEIK |
| CD40L- | 2409 | DIQMTQSPSSLSASVGDRVTITCRASQRISSFLNWYQQKPGKAPKLLIYD |
| 207 | | ASNLQSGVPSRFSGSGSGTDFTLTISSLQPEDFATYYCQPSFYFPYAFGQG |
| | | TKVEIK |
| CD40L- | 2410 | DIQMTQSPSSLSASVGDRVTITCRASQTIGDYLNWYQQKPGKAPKLLIYL |
| 208 | | GSELQSGVPSRFSGSGSGTDFTLTINSLQPEDFATYYCQTWDTGESGVFG |
| | | QGTKVEIK |
| CD40L- | 2411 | DIQMTQSPSSLSASVGDRVTITCRASQDIKNYLNWYQQKPGKAPKLLIYA |
| 209 | | VTSRASGVPSRFSGSGSGTDFTLTISSLQPEDFATYYCQQGYNSNDVDNV |
| | | FGQGTKVEIK |
| CD40L- | 2412 | DIQMTQSPSSLSASVGDRVTITCSGDKLGDKYTSWYQQKPGKVPKLLIY |
| 210 | | QNDKRPSGVPSRFSGSGSGTDFTLTISSLQPEDFATYYCQQNNNWPTTFG |
| | | QGTKVEIK |
| CD40L- | 2413 | DIQMTQSPSSLSASVGDRVTITCRASQTIGDYLNWYQQKPGKAPKLLIYE |
| 211 | | TSKLASGVPSRFSGSGSGTDFTLTISSLQPEDFATYYCQQSYSTPTFGQGT |
| | | KVEIK |
| CD40L- | 2414 | DIQMTQSPSSLSASVGDRVTITCRASQTIGDYLNWYQQKPGKAPKLLIYG |
| 212 | | TTSMESGVPSRFSGSGSGTDFTLTISSLQPEDFATYYCQQSNSWPYTFGQ |
| | | GTKVEIK |
| CD40L- | 2415 | DIQMTQSPSSLSASVGDRVTITCRASQNIRSYLNWYQQKPGKAPKLLIYP |
| 213 | | KHNRPPGVPSRFSGSGSGTDFTLTISSLQPEDFATYYCQHSRDLTFPFGQG |
| | | TKVEIK |
| CD40L- | 2416 | DIQMTQSPSSLSASVGDRVTITCSGDNLRGYYASWYQQKPGKAPKLLIY |
| 214 | | GENSRPSGVPSRFSGSGSGTDFTLTISSLQPEDFATYYCQQSYENPLTFGQ |
| | | GTKVEIK |
| CD40L- | 2417 | DIQMTQSPSSLSASVGDRVTITCRASQDIKNYLNWYQQKPGKAPKLLIYF |
| 215 | | TSTLAAGVPSRFSGSGSGTDFTLTISSLQPEDFATYYCQSGSSSANAVFGQ |
| | | GTKVEIK |
| CD40L- | 2418 | DIQMTQSPSSLSASVGDRVTITCRASQPIAYFLSWYQQKPGKAPKLLIYE |
| 216 | | NNNRPSGVPSRFSGSGSGTDFTLTISSLQPEDFATYYCQPSFLYPYTFGQG |
| | | TKVEIK |
| CD40L- | 2419 | DIQMTQSPSSLSASVGDRVTITCKASENVDTYVSWYQQKPGKAPKLLIY |
| 217 | | DDIDRPSGVPSRFSGSGSGTDFTLTISSLOPEDFATYYCQQSYSSPRTFGQ |
| | | GTKVEIK |
| CD40L- | 2420 | DIQMTQSPSSLSASVGDRVTITCRTSQSLSSYLHWYQQKPGKAPKLLIYQ |
| 218 | | NDKRPSGVPSRFSGSGSGTDFTLTISSLQPEDFATYYCKQSYDLFTFGQGT |
| | | KVEIK |
| CD40L- | 2421 | DIQMTQSPSSLSASVGDRVTITCRASQSISNNLNWYQQKPGKAPKLLIYG |
| 219 | | TSYRYSGVPSRFSGSGSGTDFTLTISSLQPEDFATYYCQQTYDTPLTFGQG |
| | | TKVEIK |
| CD40L- | 2422 | DIQMTQSPSSLSASVGDRVTITCRTSQDIGNYLNWYQQKPGKAPKLLIYG |
| 220 | | TSYRYSGVPSRFSGSGSGTDFTLTISSLQPEDFATYYCQPSFVFPYTFGQG |
| | | TKVEIK |
| CD40L- | 2423 | DIQMTQSPSSLSASVGDRVTITCRASQDIYQNLDWYQQKPGKAPKLLIYQ |
| 221 | | DFKRPSGVPSRFSGSGSGTDFTLTISSLQPEDFATYYCQAWDNGAAVFGQ |
| | | GTKVEIK |
| CD40L- | 2424 | DIQMTQSPSSLSASVGDRVTITCRTSQSLSSYLHWYQQKPGKAPKLLIYQ |
| 222 | | NDKRPSGVPSRFSGSGSGTDFTLTISSLQPEDFATYYCKQSYDLFTFGQGT |
| | | KVEIK |
| CD40L- | 2425 | DIQMTQSPSSLSASVGDRVTITCRASQSIVTYLNWYQQKPGKAPKLLIYG |
| 223 | | NNNRPSGVPSRFSGSGSGTDFTLTISSLQPEDFATYYCAQGWGRPVTFGQ |
| | | GTKVEIK |
| CD40L- | 2426 | DIQMTQSPSSLSASVGDRVTITCSASSSVTYMHWYQQKPGKAPKLLIYN |
| 224 | | AKTLPEGVPSRFSGSGSGTDFTLTISSLQPEDFATYYCAQNLEIPRTFGQG |
| | | TKVEIK |
| CD40L- | 2427 | DIQMTQSPSSLSASVGDRVTITCRASQTIGDYLNWYQQKPGKAPKLLIYG |
| 225 | | ASNLHSGVPSRFSGSGSGTDFTLTISSLQPEDFATYYCSQSTHVPYTFGQG |
| | | TKVEIK |
| CD40L- | 2428 | DIQMTQSPSSLSASVGDRVTITCKASENVDTYVSWYQQKPGKAPKLLIY |
| 226 | | DDIDRPSGVPSRFSGSGSGTDFTLTISSLQPEDFATYYCQQSYSSPRTFGQ |
| | | GTKVEIK |
| CD40L- | 2429 | DIQMTQSPSSLSASVGDRVTITCKASENVDTYVSWYQQKPGKAPKLLIY |
| 227 | | HDNKRPSGVPSRFSGSGSGTDFTLTISSLQPEDFATYYCQQSYTTPTTFGQ |
| | | GTKVEIK |
| CD40L- | 2430 | DIQMTQSPSSLSASVGDRVTITCSGDNLGDKYVHWYQQKPGKAPKLLIY |
| 228 | | GKKNRPSGVPSRFSGSGSGTDFTLTISSLQPEDFATYYCQAWDRTVVFGQ |
| | | GTKVEIK |
| CD40L- | 2431 | DIQMTQSPSSLSASVGDRVTITCRASSSVSYMHWYQQKPGKAPKLLIYQ |
| 229 | | NDKRPSGVPSRFSGSGSGTDFTLTISSLQPEDFATYYCQQHYSPSHTFGQG |
| | | TKVEIK |
| CD40L- | 2432 | DIQMTQSPSSLSASVGDRVTITCRTSQDIGNYLNWYQQKPGKAPKLLIYG |
| 230 | | TSYRYSGVPSRFSGSGSGTDFTLTISSLQPEDFATYYCQPSFVFPYTFGQG |
| | | TKVEIK |
| CD40L- | 2433 | DIQMTQSPSSLSASVGDRVTITCRASQPIGPDLLWYQQKPGKAPKLLIYD |
| 231 | | NNIRPSGVPSRFSGSGSGTDFTLTISSLQPEDFATYYCAQNLEIPRTFGQGT |
| | | KVEIK |
| CD40L- | 2434 | DIQMTQSPSSLSASVGDRVTITCRASQSILSYLNWYQQKPGKAPKLLIYD |
| 232 | | ASNLQSGVPSRFSGSGSGTDFTLTISSLQPEDFATYYCQQGYRFPLTFGQG |
| | | TKVEIK |
| CD40L- | 2435 | DIQMTQSPSSLSASVGDRVTITCRASQFIGRYFNWYQQKPGKAPKLLIYG |
| 233 | | ATILADGVPSRFSGSGSGTDFTLTISSLQPEDFATYYCQQNNNWPTTFGQ |
| | | GTKVEIK |
| CD40L- | 2436 | DIQMTQSPSSLSASVGDRVTITCRASQDVSSGVAWYQQKPGKAPKLLIYS |
| 234 | | SSYLEPGVPSRFSGSGSGTDFTLTISSLQPEDFATYYCQQSYSSAPTFGQG |
| | | TKVEIK |
| CD40L- | 2437 | DIQMTQSPSSLSASVGDRVTITCRASQDVSSGVAWYQQKPGKAPKLLIY |
| 235 | | HASQSISGVPSRFSGSGSGTDFTLTISSLQPEDFATYYCQQSYSTPRTFGQ |
| | | GTKVEIK |
| CD40L- | 2438 | DIQMTQSPSSLSASVGDRVTITCRASQDVSSGVAWYQQKPGKAPKLLIYS |
| 236 | | SSYLEPGVPSRFSGSGSGTDFTLTISSLQPEDFATYYCQQGGYAPSTFGQG |
| | | TKLEIK |
| CD40L- | 2439 | DIQMTQSPSSLSASVGDRVTITCTGDKLAEKYVSWYQQKPGKAPKLLIY |
| 237 | | ATSTLQSGVPSRFSGSGSGTDFTLTISSLQPEDFATYYCQQTALVPYTFGQ |
| | | GTKVEIK |
| CD40L- | 2440 | DIQMTQSPSSLSASVGDRVTITCQSSQSVYSNNELSWYQQKPGKAPKLLI |
| 238 | | YGRNKRPSGVPSRFSGSGSGTDFTLTISSLQPEDFATYYCSQGTHVPPTFG |
| | | QGTKVEIK |
| CD40L- | 2441 | DIQMTQSPSSLSASVGDRVTITCRASQSILSYLNWYQQKPGKAPKLLIYFT |
| 239 | | STLAAGVPSRFSGSGSGTDFTLTISSLQPEDFATYYCQQSYSSAPTFGQGT |
| | | KVEIK |
| CD40L- | 2442 | DIQMTQSPSSLSASVGDRVTITCRATQSIRSFLNWYQQKPGKAPKLLIYY |
| 240 | | NSERPSGVPSRFSGSGSGTDFTLTISSLQPEDFATYYCQQGYTRSDIDNTF |
| | | GQGTKVEIK |
| CD40L- | 2443 | DIQMTQSPSSLSASVGDRVTITCRTSQDISNYLNWYQQKPGKAPKLLIYA |
| 241 | | ASNVESGVPSRFSGSGSGTDFTLTISSLQPEDFATYYCASRNGWNHVVFG |
| | | QGTKVEIK |
| CD40L | 2444 | DIQMTQSPSSLSASVGDRVTITCSASSSVTYMHWYQQKPGKAPKLLIYN |
| 242 | | AKTLPEGVPSRFSGSGSGTDFTLTISSLQPEDFATYYCQQSYENPLTFGQG |
| | | TKVEIK |
| CD40L- | 2445 | DIQMTQSPSSLSASVGDRVTITCRASSSVSYMHWYQQKPGKAPKLLIYGE |
| 243 | | NSRPSGVPSRFSGSGSGTDFTLTISSLQPEDFATYYCQQGPGTPNTFGQGT |
| | | KVEIK |
| CD40L- | 2446 | DIQMTQSPSSLSASVGDRVTITCRTSQDISNYLNWYQQKPGKAPKLLIYA |
| 244 | | ASDLESGVPSRFSGSGSGTDFTLTISSLQPEDFATYYCQQSSSIPWTFGQG |
| | | TKVEIK |
| CD40L- | 2447 | DIQMTQSPSSLSASVGDRVTITCSGDLGEKYVSWYQQKPGKAPKLLIYQ |
| 245 | | DFKRPSGVPSRFSGSGSGTDFTLTISSLQPEDFATYYCQQPWRSPGTFGQG |
| | | TKVEIK |
| CD40L- | 2448 | DIQMTQSPSSLSASVGDRVTITCSGDNLRGYYASWYQQKPGKAPKLLIY |
| 246 | | GTTSLESGVPSRFSGSGSGTDFTLTISSLQPEDFATYYCAQGWGRPVTFG |
| | | QGTKVEIK |
| CD40L- | 2449 | DIQMTQSPSSLSASVGDRVTITCKASDHIGKFLTWYQQKPGKAPKLLIYD |
| 247 | | NNIRPSGVPSRFSGSGSGTDFTLTISSLQPEDFATYYCQHSRDLTFPFGQG |
| | | TKVEIK |
| CD40L- | 2450 | DIQMTQSPSSLSASVGDRVTITCKASENVDTYVSWYQQKPGKAPKLLIY |
| 248 | | DNNIRPSGVPSRFSGSGSGTDFTLTISSLQPEDFATYYCQRAFGTQLTFGQ |
| | | GTKVEIK |
| CD40L- | 2451 | DIQMTQSPSSLSASVGDRVTITCRASQTIGDYLNWYQQKPGKAPKLLIYY |
| 249 | | NSERPSGVPSRFSGSGSGTDFTLTISSLQPEDFANYYCSQSTHVPPTFGQG |
| | | TKVEIK |
| CD40L- | 2452 | DIQMTQSPSSLSASVGDRVTITCRASQPIGPDLLWYQQKPGKAPKLLIYG |
| 250 | | KKNRPSGVPSRFSGSGSGTDFTLTISSLQPEDFATYYCQQSYSPPLTFGQG |
| | | TKVEIK |
| CD40L- | 2453 | DIQMTQSPSSLSASVGDRVTITCRTSQDISNYLNWYQQKPGKAPKLLIYA |
| 251 | | TSNLASGVPSRFSGSGSGTDFTLTISSLQPEDFATYYCQQSYSSAPMFGQG |
| | | TKVEIK |
| CD40L- | 2454 | DIQMTQSPSSLSASVGDRVTITCSGDNLRDYIVHWYQQKPGKAPKLLIYD |
| 252 | | NNIRPSGVPSRFSGSGSGTDFTLTISSLQPEDFATYYCQSYDKSNVVFGQG |
| | | TKVEIK |
| CD40L- | 2455 | DIQMTQSPSSLSASVGDRVTITCRASQTIGDYLNWYQQKPGKAPKLLIYE |
| 253 | | TSKLASGVPSRFSGSGSGTDFTLTISSLQPEDFATYYCQQSYSTPTFGQGT |
| | | KVEIK |
| CD40L- | 2456 | DIQMTQSPSSLSASVGDRVTITCRASQFIGRYFNWYQQKPGKAPKLLIYG |
| 254 | | ATILADGVPSRFSGSGSGTDFTLTISSLQPEDFATYYCQQSYSSPLTFGQG |
| | | TKVEIK |
| CD40L- | 2457 | DIQMTQSPSSLSASVGDRVTITCKASENVDTYVSWYQQKPGKAPKLLIY |
| 255 | | HASQSISGVPSRFSGSGSGTDFTLTISSLQPEDFATYYCQQYGSSPLTFGQ |
| | | GTKVEIK |
| CD40L- | 2458 | DIQMTQSPSSLSASVGDRVTITCKASENVDTYVSWYQQKPGKAPKLLIY |
| 256 | | GQHNRPSGVPSRFSGSGSGTDFTLTISSLQPEDFATYYCQQSYENPLTFGQ |
| | | GTKVEIK |
| CD40L- | 2459 | DIQMTQSPSSLSASVGDRVTITCRASQTIGDYLNWYQQKPGKAPKLLIYE |
| 257 | | NNNRPSGVPSRFSGSGSGTNFTLTISSLQPEDFATYYCQQSTILPLTFGQG |
| | | TKVEIK |
| CD40L- | 2460 | DIQMTQSPSSLSASVGDRVTITCRTSQTIERRLNWYQQKPGKAPKLLIYQ |
| 258 | | NDKRPSGVPSRFSGSGSGTDFTLTISSLQPEDFATYYCSTRSSKGNPHVLF |
| | | GQGTKVEIK |
| CD40L- | 2461 | DIQMTQSPSSLSASVGDRVTITCSGDKLGDKYTSWYQQKPGKVPKLLIY |
| 259 | | QNDKRPSGVPSRFSGSGSGTDFTLTISSLQPEDFATYYCQQNNNWPTTFG |
| | | QGTKVEIK |
| CD40L- | 2462 | DIQMTQSPSSLSASVGDRVTITCSGDNLGDKYVHWYQQKPGKAPKLLIY |
| 260 | | FTSTLAAGVPSRFSGSGSGTDFTLTISSLQPEDFATYYCQNGHSFPLTFGQ |
| | | GTKVEIK |
| CD40L- | 2463 | DIQMTQSPSSLSASVGDRVTITCRASQDVSSGVAWYQQKPGKAPKLLIY |
| 261 | | GASNLHSGVPSRFSGSGSGTDFTLIISSLQPEDFATYYCQQGPGTPNTFGQ |
| | | GTKVEIK |
| CD40L- | 2464 | DIQMTQSPSSLSASVGDRVTITCRTSQDISNYLNWYQQKPGKAPKLLIYG |
| 262 | | KNIRPSGVPSRFSGSGSGTDFTLTISSLQPEDFATYYCQESLSASYTFGQGT |
| | | KVEIK |
| CD40L- | 2465 | DIQMTQSPSSLSASVGDRVTITCQGDFLRSYYASWYQQKPGKAPKLLIYG |
| 263 | | NNNRPSGVPSRFSGSGSGTDFTLTISSLQPEDFATYYCGFDNGGDIDVFG |
| | | QGTKVEIK |
| CD40L- | 2466 | DIQMTQSPSSLSASVGDRVTITCRTSQDISNYLNWYQQKPGKAPKLLIYD |
| 264 | | TSKVASGVPSRFSGSGSGTDFTLTISSLQPEDFATYYCQQTYDTPLTFGQG |
| | | TKVEIK |
| CD40L- | 2467 | DIQMTQSPSSLSASVGDRVTITCRASQSILSYLNWYQQKPGKAPKLLIYD |
| 265 | | ASSLHTGVPSRFSGSGSGTDFTLTISSLQPEDFATYYCQHSRDLTFPFGQG |
| | | TKVEIK |
| CD40L- | 2468 | DIQMTQSPSSLSASVGDRVTITCRASQNIRSYLNWYQQKPGKAPKLLIYS |
| 266 | | ASVLQSGVPSRFSGSGSGTDFTLTISSLQPEDFATYYCKSRAYSGNLVEFG |
| | | QGTKVEIK |
| CD40L- | 2469 | DIQMTQSPSSLSASVGDRVTITCSASQDINKYLNWYQQKPGKAPKLLIHS |
| 267 | | ASNLESGVPSRFSGSGSGTDFTLTISSLQPEDFATYYCSTYTFVGFTTVFG |
| | | QGTKVEIK |
| CD40L- | 2470 | DIQMTQSPSSLSASVGDRVTITCRASEVEYHGTSLMHWYQQKPGKAPKL |
| 268 | | LIYGTSNLESGVPSRFSGSGSGTDFTLTISSLQPEDFATYYCQQVVWRPFT |
| | | FGQGTKVEIK |
| CD40L- | 2471 | DIQMTQSPSSLSASVGDRVTITCRASQTIERRLNWYQQKPGKAPKLLIYE |
| 269 | | DTKRPSGVPSRFSGSGSGTDFTLTISSLQPEDFATYYCAQGAALPRTFGQ |
| | | GTKVEIK |
| CD40L- | 2472 | DIQMTQSPSSLSASVGDRVTITCRPNQNIATYINWYQQKPGKAPKLLIYD |
| 270 | | TSKVASGVPSRFSGSGSGTDFTLTISSLQPEDFATYYCQQSYSPLTFGQGT |
| | | KVEIK |
| CD40L- | 2473 | DIQMTQSPSSLSASVGDRVTITCSGDKLGDKYAYWYQQKPGKAPKLLIY |
| 271 | | FTSTLAAGVPSRFSGSGSGTDFTLTISSLQPEDFATYYCQQSYSSAPTFGQ |
| | | GTKVEIK |
| CD40L- | 2474 | DIQMTQSPSSLSASVGDRVTITCQGDFLRSYYASWYQQKPGKAPKLLIYG |
| 272 | | KNIRPSGVPSRFSGSGSGTDFTLTISSLQPEDFATYYCVARGTRGNPHVLF |
| | | GQGTKVEIK |
| CD40L- | 2475 | DIQMTQSPSSLSASVGDRVTITCTGDKLAEKYVSWYQQKPGKAPKLLIY |
| 273 | | YNSERPSGVPSRFSGSGSGTDFTLTISSLQPEDFATYYCAQGLRKPKTFGQ |
| | | GTKVEIK |
| CD40L- | 2476 | DIQMTQSPSSLSASVGDRVTITCRPNQNIATYINWYQQKPGKAPKLLIYD |
| 274 | | TSKVASGVPSRFSGSGSGTDFTLTISSLQPEDFATYYCQQSYSPLTFGQGT |
| | | KVEIK |
| CD40L | 2477 | DIQMTQSPSSLSASVGDRVTITCTGDKLAEKYVSWYQQKPGKAPKLLIY |
| 275 | | GASSRATGVPSRFSGSGSGTDFTLTISSLQPEDFATYYCVARAVRGNPHV |
| | | LFGQGTKVEIK |
| CD40L- | 2478 | DIQMTQSPSSLSASVGDRVTITCRASQRISSFLNWYQQKPGKAPKLLIYD |
| 276 | | NNIRPSGVPSRFSGSGSGTDFTLTISSLQPEDFATYYCQQSYSPLTFGQGT |
| | | KVEIK |
| CD40L- | 2479 | DIQMTQSPSSLSASVGDRVTITCRASQSISSYVNWYQQKPGKAPKLLIYA |
| 277 | | NTNGPSGVPSRFSGSGSGTDFTLTISSLQPEDFATYYCQSYDNSVRGSRVF |
| | | GQGTKVEIK |
| CD40L- | 2480 | DIQMTQSPSSLSASVGDRVTITCRASQDVSSGVAWYQQKPGKAPKLLIYE |
| 278 | | DTKRPSGVPSRFSGSGSGTDFTLTISSLQPEDFATYYCQQTYSPPLTFGQG |
| | | TKVEIK |
| CD40L- | 2481 | DIQMTQSPSSLSASVGDRVTITCRASQPIGPDLLWYQQKPGKAPKLLIYD |
| 279 | | ASNLQSGVPSRFSGSGSGTDFTLTISSLQPEDFATYYCQQGYTRTDIDNTF |
| | | GQGTKVEIK |
| CD40L- | 2482 | DIQMTQSPSSLSASVGDRVTITCSGDNIGSIYASWYQQKPGKAPKLLIYQ |
| 280 | | NDKRPSGVPSRFSGSGSGTDFTLTISSLQPEDFATYYCQQGYTRTDIDNTF |
| | | GQGTKVEIK |
| CD40L- | 2483 | DIQMTQSPSSLSASVGDRVTITCRASQTISSYLNWYQQKPGKAPKLLIYA |
| 281 | | VTSLASGVPSRFSGSGSGTDFTLTISSLQPEDFATYYCQQSYAVSPYTFGQ |
| | | GTKVEIK |
| CD40L- | 2484 | DIQMTQSPSSLSASVGDRVTITCRASQTIGDYLNWYQQKPGKAPKLLIYA |
| 282 | | KNNRPSGVPSRFSGSGSGTDFTLTISSLQPEDFATYYCQQGYTRTDIDNTF |
| | | GQGTKLEIK |
| CD40L- | 2485 | DIQMTQSPSSLSASVGDRVTITCRASQTIERRLNWYQQKPGKAPKLLIYA |
| 283 | | ASSLYSGVPSRFSGSGSGTDFTLTISSLQPEDFATYYCQQSQAAPLTFGQG |
| | | TKVEIK |
| CD40L- | 2486 | DIQMTQSPSSLSASVGDRVTITCRASQDIYQNLDWYQQKPGKAPKLLIYD |
| 284 | | ASSSQSGVPSRFSGSGSGTDFTLTISSLQPEDFATYYCQQSYSSPRTFGQG |
| | | TKVEIK |
| CD40L- | 2487 | DIQMTQSPSSLSASVGDRVTITCKASENVDTYVSWYQQKPGKAPKLLIY |
| 285 | | DDIDRPSGVPSRFSGSGSGTDFTLTISSLQPEDFATYYCQQYDAYPPTFGQ |
| | | GTKVEIK |
| CD40L- | 2488 | DIQMTQSPSSLSASVGDRVTITCRASQDIGNFLNWYQQKPGKAPKLLIYA |
| 286 | | ASSLYSGVPSRFSGSGSGTDFTLTISSLQPEDFATYYCQQINELPYTFGQG |
| | | TKVEIK |
| CD40L- | 2489 | DIQMTQSPSSLSASVGDRVTITCQSSQSVYSNNELSWYQQKPGKAPKLLI |
| 287 | | YGRNKRPSGVPSRFSGSGSGTDFTLTISSLQPEDFATYYCSQGTHVPPTFG |
| | | QGTKVEIK |
| CD40L- | 2490 | DIQMTQSPSSLSASVGDRVTITCRASQSIVTYLNWYQQKPGKAPKLLIYG |
| 288 | | NNNRPSGVPSRFSGSGSGTDFTLTISSLQPEDFATYYCQQSYENPLTFGQG |
| | | TKVEIK |
| CD40L- | 2491 | DIQMTQSPSSLSASVGDRVTITCSASQDINKYLNWYQQKPGKAPKLLIYA |
| 289 | | ASNVESGVPSRFSGSGSGTDFTLTISSLQPEDFATYYCQQSYSNLWTFGQ |
| | | GTKVEIK |
| CD40L- | 2492 | DIQMTQSPSSLSASVGDRVTITCRASQYIGTALNWYQQKPGKAPKLLIYH |
| 290 | | ASQSISGVPSRFSGSGSGTDFTLTISSLQPEDFATYYCAQTGTHPTTFGQG |
| | | TKVEIK |
| CD40L- | 2493 | DIQMTQSPSSLSASVGDRVTITCRASQTIERRLNWYQQKPGKAPKLLIYD |
| 291 | | ASSLHTGVPSRFSGSGSGTDFTLTISSLQPEDFATYYCQAWGSSTVIFGQG |
| | | TKVEIK |
| CD40L- | 2494 | DIQMTQSPSSLSASVGDRVTITCSGDTLGGKYVWWYQQKPGKAPKLLIY |
| 292 | | GATILADGVPSRFSGSGSGTDFTLTISSLQPEDFATYYCNSRDNSGTDLIF |
| | | GQGTKVEIK |
| CD40L- | 2495 | DIQMTQSPSSLSASVGDRVTITCSGDLGEKYVSWYQQKPGKAPKLLIYG |
| 293 | | QHNRPSGVPSRFSGSGSGTDFTLTISSLQPEDFATYYCQQGYRFPLTFGQG |
| | | TKVEIK |
| CD40L- | 2496 | DIQMTQSPSSLSASVGDRVTITCRPNQNIATYINWYQQKPGKAPKLLIYA |
| 294 | | TSTLQSGVPSRFSGSGSGTDFTLTISSLQPEDFATYYCQQSYSRPYTFGQG |
| | | TKVEIK |
| CD40L- | 2497 | DIQMTQSPSSLSASVGDRVTITCRASQDIKNYLNWYQQKPGKAPKLLIYH |
| 295 | | ASQSISGVPSRFSGSGSGTDFTLTISSLQPEDFATYYCQQRDTTPWTFGQG |
| | | TKVEIK |
| CD40L- | 2498 | DIQMTQSPSSLSASVGDRVTITCSGDKLGDKYTSWYQQKPGKAPKLLIY |
| 296 | | QMSHLASGVPSRFSGSGSGTDFTLTISSLQPEDFATYYCQAWDRNTYVV |
| | | FGQGTKVEIK |
| CD40L- | 2499 | DIQMTQSPSSLSASVGDRVTITCTGDKLAEKYVSWYQQKPGKAPKLLIY |
| 297 | | EDTKRPSGVPSRFSGSGSGTDFTLTISSLQPEDFATYYCFQGSHVPVTFGQ |
| | | GTKVEIK |
| CD40L- | 2500 | DIQMTQSPSSLSASVGDRVTITCSASSSVTYMHWYQQKPGKAPKLLIYG |
| 298 | | KNIRPSGVPSRFSGSGSGTDFTLTISSLQPEDFATYYCQSGSSSANAVFGQ |
| | | GTKVEIK |
| CD40L- | 2501 | DIQMTQSPSSLSASVGDRVTITCRASQDISNYLNWYQQKPGKAPKLLIYG |
| 299 | | KKNRPSGVPSRFSGSGSGTDFTLTISSLQPEDFATYYCQQGYTRTDIDNTF |
| | | GQGTKVEIK |
| CD40L- | 2502 | DIQMTQSPSSLSASVGDRVTITCTGDKLAEKYVSWYQQKPGKAPKLLIY |
| 300 | | GTSNLESGVPSRFSGSGSGTDFTLTISSLQPEDFATYYCSSFAGNSLEVFG |
| | | QGTKVEIK |
| CD40L- | 2503 | DIQMTQSPSSLSASVGDRVTITCRASQTIGDYLNWYQQKPGKAPKLLIYA |
| 301 | | VTSLASGVPSRFSGSGSGTDFTLTISSLQPEDFATYYCQQSYRAPQTFGQG |
| | | TKVEIK |
| CD40L- | 2504 | DIQMTQSPSSLSASVGDRVTITCSGDNLGDKYVHWYQQKPGKAPKLLIY |
| 302 | | GRNKRPSGVPSRFSGSGSGTDFTLTISSLQPEDFATYYCQAWDRNTYVVF |
| | | GQGTKVEIK |
| CD40L- | 2505 | DIQMTQSPSSLSASVGDRVTITCRASQSISNNLNWYQQKPGKAPKLLIYA |
| 303 | | TSNLASGVPSRFSGSGSGTDFTLTISSLQPEDFATYYCQQGDALPPTFGQG |
| | | TKVEIK |
| CD40L- | 2506 | DIQMTQSPSSLSASVGDRVTITCRASQPIGPDLLWYQQKPGKAPKLLIYH |
| 304 | | ASQSISGVPSRFSGSGSGTDFTLTISSLQPEDFATYYCQQSYSTPYTFGQGT |
| | | KVEIK |
| CD40L- | 2507 | DIQMTQSPSSLSASVGDRVTITCSGDNIGSIYASWYQQKPGKAPKLLIYD |
| 305 | | NNIRPSGVPSRFSGSGSGTDFTLTISSLQPEDFATYYCQTNYGTSSSNYGF |
| | | AFGQGTKVEIK |
| CD40L- | 2508 | DIQMTQSPSSLSASVGDRVTITCTGKLAEKYVSWYQQKPGKAPKLLIYG |
| 306 | | TSYRYSGVPSRFSGSGSGTDFTLTISSLQPEDFATYYCQSVDYSAGLTFGQ |
| | | GTKVEIK |
| CD40L- | 2509 | DIQMTQSPSSLSASVGDRVTITCRASQDIYQNLDWYQQKPGKAPKLLIYG |
| 307 | | ASSRATGVPSRFSGSGSGTDFTLTISSLQPEDFATYYCQQDAFHPPTFGQG |
| | | TKVEIK |
| CD40L- | 2510 | DIQMTQSPSSLSASVGDRVTITCSGDKLGHTYTSWYQQKPGKAPKLLIYG |
| 308 | | NNNRPSGVPSRFSGSGSGTDFTLTISSLQPEDFATYYCGQGVLWPATYGQ |
| | | GTKVEIK |
| CD40L- | 2511 | DIQMTQSPSSLSASVGDRVTITCKASQHVITHVTWYQQKPGKAPKLLIYS |
| 309 | | ASNLESGVPSRFSGSGSGTDFTLTISSLQPEDFATYYCQQSYSHPYTFGQG |
| | | TKVEIK |
| CD40L- | 2512 | DIQMTQSPSSLSASVGDRVTITCKSSQSLLYSNGKTFLSWYQQKPGKAPK |
| 310 | | LLIYQNDKRPSGVPSRFSGSGSGTDFTLTISSLQPEDFATYYCSAFTHNSD |
| | | VFGQGTKVEIK |
| CD40L- | 2513 | DIQMTQSPSSLSASVGDRVTITCRASQSILSYLNWYQQKPGKAPKLLIYG |
| 311 | | ASNLHSGVPSRFSGSGSGTDFTLTISSLQPEDFATYYCQQSYSIPLTFGQG |
| | | TKVEIK |
| CD40L- | 2514 | DIQMTQSPSSLSASVGDRVTITCRASQSVDRYFNWYQQKPGKAPKLLIY |
| 312 | | HDNKRPSGVPSRFSGSGSGTDFTLTISSLQPEDFATYYCAQGLRKPKTFG |
| | | QGTKVEIK |
| CD40L- | 2515 | DIQMTQSPSSLSASVGDRVTITCRASQPIAYFLSWYQQKPGKAPKLLIYQ |
| 313 | | DFKRPSGVPSRFSGSGSGTDFTLTISSLQPEDFATYYCAGGYSSISDNGFG |
| | | QGTKVEIK |
| CD40L- | 2516 | DIQMTQSPSSLSASVGDRVTITCSASQDINKYLNWYQQKPGKAPKLLIYA |
| 314 | | TSTLQSGVPSRFSGSGSGTDFTLTISSLQPEDFATYYCQQSYTTPWTFGQG |
| | | TKVEIK |
| CD40L- | 2517 | DIQMTQSPSSLSASVGDRVTITCSGDNLGDKYVHWYQQKPGKAPKLLIY |
| 315 | | GKKNRPSGVPSRFSGSGSGTDFTLTISSLQPEDFATYYCQAWDRTVVFGQ |
| | | GTKVEIK |
| CD40L- | 2518 | DIQMTQSPSSLSASVGDRVTITCRASQSIGAYLNWYQQKPGKAPKLLIYD |
| 316 | | ASSLRSGVPSRFSGSGSGTDFTLTISSLQPEDFATYYCQQTYSNPITFGGGT |
| | | KVEIK |
| CD40L- | 2519 | DIQMTQSPSSLSASVGDRVTITCRASRSISSYLNWYQQKPGKAPKLLIYA |
| 317 | | GSNLQSGVPSRFSGSGSGTDFTLTISSLQPEDFATYYCQQSFSAPPTFGGG |
| | | TKVEIK |
| CD40L- | 2520 | DIQMTQSPSSLSASVGDRVTITCRASQNIYSYLNWYQQKPGKAPKLLIYA |
| 318 | | SSNLQSGVPSRFSGSGSGTDFTLTISSLQPEDFATYYCQQTYSVPFTFGGG |
| | | TKVEIK |
| CD40L- | 2521 | DIQMTQSPSSLSASVGDRVTITCRASQSIYTYLNWYQQKPGKAPKLLIYT |
| 319 | | ASALQTGVPSRFSGSGSGTDFTLTISSLQPEDFATYYCQQSYRIPLTFGGG |
| | | TKVEIK |
| CD40L- | 2522 | DIQMTQSPSSLSASVGDRVTITCRASQSLSTYLNWYQQKPGKAPKLLIYA |
| 320 | | ASSLHSGVPSRFSGSGSGTDFTLTISSLQPEDFATYYCQQSYSTPPEYTFG |
| | | GGTKVEIK |
| CD40L- | 2523 | DIQMTQSPSSLSAYVGDRVTITCRASQSIGIHLNWYQQKPGKAPKLLIYG |
| 321 | | ASRLQTGVPSRFSGSGSGTDFTLTISSLQPEDFATYYCQQSYSAPLTFGGG |
| | | TKVEIK |
| CD40L- | 2524 | DIQMTQSPSSLSASVGDRVTITCRASQSIYNYLNWYQQKPGKAPKLLIYA |
| 322 | | ASSLQRGVPSRFSGSGSGTDFTLTISSLQPEDFATYYCQQSYGAPFTFGGG |
| | | TKVEIK |
| CD40L- | 2525 | DIQMTQSPSSLSASVGDRVTITCRGSQSISSFLNWYQQKPGKAPKLLIYAA |
| 323 | | SKLHSGVPSRFSGSGSGTDFTLTISSLQPEDFATYYCQHSYSTPLTFGGGT |
| | | KVEIK |
| CD40L- | 2526 | DIQMTQSPSSLSASVGDRVTITCRASQSISNYLHWYQQKPGKAPKLLIYG |
| 324 | | ASILQSGVPSRFSGSGSGTDFTLTISSLQPEDFATYYCQQSYSTPSFGGGTK |
| | | VEIK |
| CD40L- | 2527 | DIQMTQSPSSLSASVGDRVTITCRASQTISYYLNWYQQKPGKAPKLLIYE |
| 325 | | TSNLQSGVPSRFSGSGSGTDFTLTISSLQPEDFATYYCQQTYSTPLTFGGG |
| | | TKVEIK |
| CD40L- | 2528 | DIQMTQSPSSLSASVGDRVTITCRASQRIITYLNWYQQKPGKAPKLLIYG |
| 326 | | ASILQGGVPSRFSGSGSGTDFTLTISSLQPEDFATYYCQQSYSTTPTFGGG |
| | | TKVEIK |
| CD40L- | 2529 | DIQMTQSPSSLSASVGDRVTITCRASQSIYTYLNWYQQKPGKAPKLLIYD |
| 327 | | VSSFQSGVPSRFSGSGSGTDFTLTISSLQPEDFATYYCQQGYSTPLTFGGG |
| | | TKVEIK |
| CD40L- | 2530 | DIQMTQSPSSLSASVGDRVTITCRASQNINKYLNWYQQKPGKAPKLLIYL |
| 328 | | ASTLHSGVPSRFSGSGSGTDFTLTISSLQPEDFATYYCQQSHSIPRTFGGGT |
| | | KVEIK |
| CD40L- | 2531 | DIQMTQSPSSLSASVGDRVTITCRASQYINNYLNWYQQKPGKAPKLLIYA |
| 329 | | SSTLQRGVPSRFSGSGSGTDFTLTISSLQPEDFATYYCQQSFSTPITFGGGT |
| | | KVEIK |
| CD40L- | 2532 | DIQMTQSPSSLSASVGDRVTITCRASQTIGSYLNWYQQKPGKAPKLLIYS |
| 330 | | ASTLQTGVPSRFSGSGSGTDFTLTISSLQPEDFATYYCQQSYSPPLTFGGG |
| | | TKVEIK |
| CD40L- | 2533 | DIQMTQSPSSLSASVGDRVTITCRASQTISYYLNWYQQKPGKAPKLLIYD |
| 331 | | ATSLQSGVPSRFSGSGSGTDFTLTISSLQPEDFATYYCQQTYSLPLTFGGG |
| | | TKVEIK |
| CD40L- | 2534 | DIQMTQSPSSLSASVGDRVTITCRASQGISKYLNWYQQKPGKAPKLLIYG |
| 332 | | ASNVQSGVPSRFSGSGSGTDFTLTISSLQPEDFATYYCQQSYNTPTTFGGG |
| | | TKVEIK |
| CD40L- | 2535 | DIQMTQSPSSLSASVGDRVTITCRASQNIYSYLNWYQQKPGKAPKLLIYE |
| 333 | | ASTLQTGVPSRFSGSGSGTDFTLTISSLQPEDFATYYCQQSFSPPFTFGGGT |
| | | KVEIK |
| CD40L- | 2536 | DIQMTQSPSSLSASVGDRVTITCRASQTITSYLNWYQQRPGKAPKLLIYA |
| 334 | | SSSLQTGVPSRFSGSGSGTDFTLTISSLQPEDFATYYCQQSYSTPITFGGGT |
| | | KVEIK |
| CD40L- | 2537 | DIQMTQSPSSLSASVGDRVTITCRASQNINTFLNWYQQKPGKAPKLLIYA |
| 335 | | SSNLQSGVPSRFSGSGSGTDFTLTISSLQPEDFATYYCQQGYRTPITFGGG |
| | | TKVEIK |
| CD40L- | 2538 | DIQMTQSPSSLSASVGDRVTITCRASQTIGTYLHWYQQKPGKAPKLLIYG |
| 336 | | TSSLQSGVPSRFSGSGSGTDFTLTISSLQPEDFATYYCQQTYSPPPDFGGG |
| | | TKVEIK |
| CD40L- | 2539 | DIQMTQSPSSLSASVGDRVTITCRASQSISNYLHWYQQKPGKAPKLLIYG |
| 337 | | ASILQSGVPSRFSGSGSGTDFTLTISSLQPEDFATYYCQQSYSTPSFFGGTT |
| | | VEIK |
| CD40L- | 2540 | DIQMTQSPSSLSASVGDRVTITCRASQNIDRYLNWYQQKPGKAPKLLIYA |
| 338 | | ASALQSGVPSRFSGSGSGTDFTLTISSLQPEDFATYYCQQSYSILPVTFGQ |
| | | GTKVEIK |
| CD40L- | 2541 | DIQMTQSPSSLSASVGDRVTITCRASQSIGTFLNWYQQKPGKAPKLLIYG |
| 339 | | TSNLQSGVPSRFSGSGSGTDFTLTISSLQPEDFATYYCQQGYRTPLTFGQG |
| | | TKVEIK |
| CD40L- | 2542 | DIQMTQSPSSLSASVGDRVTITCRASQSVSRFLNWYQQKPGKAPKLLIYA |
| 340 | | ASTLQPGVPSRFSGSGSGTDFTLTISSLQPEDFATYYCQQSYETPLTFGQG |
| | | TKVEIK |
| CD40L- | 2543 | DIQMTQSPSSLSASVGDRVTITCRASQSISTYLNWYQQKPGKAPKLLIYR |
| 341 | | ASTLQSGVPSRFSGSGSGTDFTLTISSLQPEDFATYYCQQSYSNPPTFGQG |
| | | TKVEIK |
| CD40L- | 2544 | DIQMTQSPSSLSASVGDRVTITCRASQSISRYLNWYQQKPGKAPKLLIYA |
| 342 | | ESTLQSGVPSRFSGSGSGTDFTLTISSLQPEDFATYYCQQSYTIPLTFGQGT |
| | | KVEIK |
| CD40L- | 2545 | DIQMTQSPSSLSASVGDRVTITCRASQYINNYLNWYQQKPGKAPKLLIYA |
| 343 | | SSTLQRGVPSRFSGSGSGTDFTLTISSLQPEDFATYYCQQSFSTPITFGQGT |
| | | KVEIK |
| CD40L- | 2546 | DIQMTQSPSSLSASVGDRVTITCRASESITTYLNWYQQKPGKAPKLLIYT |
| 344 | | ASGLQSGVPSRFSGSGSGTDFTLTISSLQPEDFATYYCQQSYTVPITFGQG |
| | | TKVEIK |
| CD40L- | 2547 | DIQMTQSPSSLSASVGDRVTITCRASQTISNFLNWYQQKPGKAPKLLIYA |
| 345 | | ASTLQYGVPSRFSGSGSGTDFTLTISSLQPEDFATYYCQQNYRSPLTFGQG |
| | | TKVEIK |
| CD40L- | 2548 | DIQMTQSPSSLSASVGDRVTITCRASRSITNYLNWYQQKPGKAPKLLIYG |
| 346 | | ASNLQSGVPSRFSGSGSGTDFTLTISSLQPEDFATYYCQQSYTTPPTFGQG |
| | | TKVEIK |
| CD40L- | 2549 | DIQMTQSPSSLSASVGDRVTITCRASQSIGTFLNWYQQKPGKAPKLLIYG |
| 347 | | TSNLQSGVPSRFSGSGSGTDFTLTISSLQPEDFATYYCQQGYRTPLTFGGG |
| | | TKVEIK |
| CD40L- | 2550 | DIQMTQSPSSLSASVGDRVTITCRASQTISNFLNWYQQKPGKAPKLLIYA |
| 348 | | ASTLQYGVPSRFSGSGSGTDFTLTISSLQPEDFATYYCQQNYRSPLTFGGG |
| | | TKVEIK |
| CD40L- | 2551 | DIQMTQSPSSLSASVGDRVTITCRASQTIGSYLNWYQQKPGKAPKLLIYA |
| 349 | | ASTLQPGVPSRFSGSGSGTDFTLTISSLQPEDFATYYCQQSYETPLTFGGG |
| | | TKVEIK |
| CD40L- | 2552 | DIQMTQSPSSLSASVGDRVTITCRASQSISSYVSWYQQKPGKAPKLLIYD |
| 350 | | ASSLSGGVPSRFSGSGSGTDFTLTISSLQPEDFATYYCQQSYRIPLTFGGGT |
| | | KVEIK |
| CD40L- | 2553 | DIQMTQSPSSLSASVGDRVTITCRASRSITNYLNWYQQKPGKAPKLLIYG |
| 351 | | ASNLQSGVPSRFSGSGSGTDFTLTISSLQPEDFATYYCQQSYTTPPTFGGG |
| | | TKVEIK |
| CD40L- | 2554 | DIQMTQSPSSLSASVGDRVTITCRASQSISSYLNWYQQKPGKAPKLLIYA |
| 352 | | ASSWQSGVPSRFSGSGSGTDFTLTISSLQPEDFATYYCQQSFSTPQTFGGG |
| | | TKVEIK |
| CD40L- | 2555 | DIQMTQSPSSLSASVGDRVTITCRASQTIGSYLHWYQQKPGKAPKLLIYG |
| 353 | | TSSLQSGVPSRFSGSGSGTDFTLTISSLQPEDFATYYCQQTYSPPPDFGGG |
| | | TKVEIK |
| CD40L- | 2556 | DIQMTQSPSSLSASVGDRVTITCRASQSIGEYLNWYQQKPGKAPKLLIYS |
| 354 | | ASSLQNGVPSRFSGSGSGTDFTLTISSLQPEDFATYYCQQTYSFPLTFGGG |
| | | TKVEIK |
| CD40L- | 2557 | DIQMTQSPFSLSASVGDRVTITCRASQNILTYLNWYQQKPGKAPKLLIYG |
| 355 | | ASTLRSGVPSRFSGSGSGTDFTLTISSLQPEDFATYYCQQSYRLPLTFGGG |
| | | TKVEIK |
| CD40L- | 2558 | DIQMTQSPSSLSASVGDRVTITCRASQSIGAYLNWYQQKPGKAPKLLIYD |
| 356 | | ASSLRSGVPSRFSGSGSGTDFTLTISSLQPEDFATYYCQQTYSNPITFGGGT |
| | | KVEIK |
| CD40L- | 2559 | DIQMTQSPSSLSASVGDRVTITCRASQSVSTYLNWYQQKPGKAPKLLIYA |
| 357 | | TSTLQGGVPSRFSGSGSGTDFTLTISSLQPEDFATYYCQQSYTPPITFGGGT |
| | | KVEIK |
| CD40L- | 2560 | DIQMTQSPSSLSASVGDRVTITCRASQYIGTYLNWYQQKPGKAPKLLIYA |
| 358 | | AANLQSGVPSRFSGSGSGTDFTLTISSLQPEDFATYYCQQSYSIPLTFGGG |
| | | TKVEIK |
| CD40L- | 2561 | DIQMTQSPSSLSASVGDRVTITCRASQNIGGYLNWYQQKPGKAPKLLIYG |
| 359 | | ASRLQSGVPSRFSGSGSGTDFTLTISSLQPEDFATYYCQQSYSTPFTFGGG |
| | | TKVEIK |
| CD40L- | 2562 | DIQMTQSPSSLSASVGDRVTITCRASQTISSYLSWYQQKPGKAPKLLIYD |
| 360 | | ASTLQSGVPSRFSGSGSGTDFTLTISSLQPEDFATYYCQQSYRIPLTFGGG |
| | | TKVEIK |
| CD40L- | 2563 | DIQMTQSPSSLSASVGDRVTITCRASQSIKSYLNWYQQKPGKAPKLLIYS |
| 361 | | ASSLLSGVPSRFSGSGSGTDFTLTISSLQPEDFATYYCQQSYTLPRTFGGG |
| | | TKVEIK |
| CD40L- | 2564 | DIQMTQSPSSLSASVGDRVTITCRASQNIINYLNWYQQKPGKAPKLLIYG |
| 362 | | ASTLESGVPSRFSGSGSGTDFTLTISSLQPEDFATYYCQQSYSVPLTFGGG |
| | | TKVEIK |
| CD40L- | 2565 | DIQMTQSPSSLSASVGDRVTITCRTSQSISSYANWYQQKPGKAPKLLIYG |
| 363 | | ASRLESGVPSRFSGSGSGTDFTLTISSLQPEDFATYYCQQTYSTPWTFGGG |
| | | TKVGIK |
| CD40L- | 2566 | DIQMTQSPSSLSASVGDRVTITCRVSQSISSYLHWYQQKPGKAPKLLIYA |
| 364 | | ASSLQTGVPSRFSGSGSGTDFTLTISSLQPEDFATYYCQQSYTLPLTFGGG |
| | | TKVEIK |
| CD40L- | 2567 | DIQMTQSPSSLSASVGDRVTITCRASQSIATYLHWYQQKPGKAPKLLIYS |
| 365 | | ASTLESGVPSRFSGSGSGTDFTLTISSLQPEDFATYYCQQSYRPPLTFGGG |
| | | TKVEIK |
| CD40L- | 2568 | DIQMTQSPSSLSASVGDRVTITCRASQSVSRFLNWYQQKPGKAPKLLIYA |
| 366 | | ASTLQPGVPSRFSGSGSGTDFTLTISSLQPEDFATYYCQQSYETPLTFGGG |
| | | TKVEIK |
| CD40L- | 2569 | DIQMTQSPSSLSASVGDRVTITCRASRSITNYLNWYQQKPGKAPKLLIYG |
| 367 | | ASNLQSGVPSRFSGSGSGTDFTLTISSLQPEDFATYYCQQSYTTPPTFGGG |
| | | TKVEIK |
| CD40L- | 2570 | DIQMTQSPSSLSASVGDRVTITCRASQSIGTFLNWYQQKPGKAPKLLIYG |
| 368 | | TSNLQSGVPSRFSGSGSGTDFTLTISSLQPEDFATYYCQQGYRTPLTFGGG |
| | | TKVEIK |
| CD40L- | 2571 | DIQMTQSPSSLSASVGDRVTITCRGSQSISSFLNWYQQKPGKAPKLLIYAA |
| 369 | | SKLHSGVPSRFSGSGSGTDFTLTISSLQPEDFATYYCQHSYSTPLTFGGGT |
| | | KVEIK |
| CD40L- | 2572 | DIQMTQSPSSLSASVGDRVTITCRASQUIGTYLNWYQQKPGKAPKLLIYGS |
| 370 | | SNLQSGVPSRFSGSGSGTDFTLTISSLRPEDFATYYCQQSYGTPFTFGGGT |
| | | KVEIK |
| CD40L- | 2573 | DIQMTQSPSSLSASVGDRVTITCRASQSISKYLNWYQQKPGKAPKLLIYA |
| 371 | | ATSLESGVPSRFSGSGSGTDFTLTISSLQPEDFATYYCQQSYSTPLFTFGG |
| | | GTKVEIK |
| CD40L- | 2574 | DIQMTQSPSSLSASVGDRVTITCRASQSIRSYLNWYQQKPGKAPKLLIYA |
| 372 | | TSSLHSGVPSRFSGSGSGTDFTLTISSMQPEDFATYYCQQSFSLPPTFGGG |
| | | TKVEIK |
| CD40L- | 2575 | DIQMTQSPSSLSASVGDRVTITCRGSQSISSFLNWYQQKPGKAPKLLIYAA |
| 373 | | SKLHSGVPSRFSGSGSGTDFTLTISSLQPEDFATYYCQHSYSTPLTFGGGT |
| | | KVEIK |
| CD40L- | 2576 | DIQMTQSPSSLSASVGDRVTITCRASQTISYYLNWYQQKPGKAPKLLIYG |
| 374 | | ASSLQNGVPSRFSGSGSGTDFTLTISSLQPEDFATYYCQQGYSAPFTFGGG |
| | | TKVEIK |
| CD40L- | 2577 | DIQMTQSPSSLSASVGDRVTITCRASQSIGVYLNWYQQKPGKAPKLLIYS |
| 375 | | ASSLQRGVPSRFSGSGSGTDFTLTISSLQPEDFATYYCQQSFTIPYTFGGGT |
| | | KVEIK |
| CD40L- | 2578 | DIQMTQSPSSLSASVGDRVTITCRASQSISTFLSWYQQKPGKAPKLLIYAT |
| 376 | | STLESGVPSRFSGSGSGTDFTLTISSLQPEDFATYYCQQSYSTPLTFGGGT |
| | | KVEIK |
| CD40L- | 2579 | DIQMTQSPSSLSASVGDRVTITCRASQSISNYLHWYQQKPGKAPKLLIYG |
| 377 | | ASILQSGVPSRFSGSGSGTDFTLTISSLQPEDFATYYCQQSYSTPSFGGGTK |
| | | VEIK |
| CD40L- | 2580 | DIQMTQSPSSLSASVGDRVTITCRASQSISTYLNWYQQKPGKAPKLLIYR |
| 378 | | ASTLQSGVPSRFSGSGSGTDFTLTISSLQPEDFATYYCQQSYSNPPTFGGG |
| | | TKVEIK |
| CD40L- | 2581 | DIQMTQSPSSLSASVGDRVTITCRASQNIDRYLNWYQQKPGKAPKLLIYA |
| 379 | | ASALQSGVPSRFSGSGSGTDFTLTISSLQPEDFATYYCQQSYSILPVTFGG |
| | | GTKVEIK |
| CD40L- | 2582 | DIQMTQSPSSLSASVGDRVTITCRASQSVSRFLNWYQQKPGKAPKLLIYA |
| 380 | | ASTLQPGVPSRFSGSGSGTDFTLTISSLQPEDFATYYCQQSYETPLTFGGG |
| | | TKVEIK |
| CD40L- | 2583 | DIQMTQSPSSLSASVGDRVTITCRASQSIPTYLNWYQQKPGKAPKLLIYA |
| 381 | | AANLQSGVPSRFSGSGSGTDFTLTISSLQPEDFATYYCQQSYATPFTFGGG |
| | | TKVEIK |
| CD40L- | 2584 | DIQMTQSPSSLSASVGDRVTITCRASQSIGTFLNWYQQKPGKAPKLLIYG |
| 382 | | TSNLQSGVPSRFSGSGSGTDFTLTISSLQPEDFATYYCQQGYRTPLTFGGG |
| | | TKVEIK |
| CD40L- | 2585 | DIQMTQSPSSLSASVGDRVTITCRASQYINNYLNWYQQKPGKAPKLLIYA |
| 383 | | SSTLQRGVPSRFSGSGSGTDFTLTISSLQPEDFATYYCQQSFSTPITFGGGT |
| | | KVEIK |
| CD40L- | 2586 | DIQMTQSPSSLSASVGDRVTITCRASQSLSTYLNWYQQKPGKAPKLLIYA |
| 384 | | ASSLHSGVPSRFSGSGSGTDFTLTISSLQPEDFATYYCQQSYSTPPEYTFG |
| | | GGTKVEIK |
| CD40L- | 2587 | DIQMTQSPSSLSASVGDRVTITCRASQSIKSYLNWYQQKPGKAPKLLIYS |
| 385 | | ASSLLSGVPSRFSGSGSGTDFTLTISSLQPEDFATYYCQQSYTLPRTFGGG |
| | | TKVEIK |
| CD40L- | 2588 | DIQMTQSPSSLSASVGDRVTITCRASESITTYLNWYQQKPGKAPKLLIYT |
| 386 | | ASGLQSGVPSRFSGSGSGTDFTLTISSLQPEDFATYYCQQSYTVPITFGGG |
| | | TKVEIK |
| CD40L- | 2589 | DIQMTQSPSSLSASVGDRVTITCRASQSIGEYLNWYQQKPGKAPKLLIYS |
| 387 | | ASSLQNGVPSRFSGSGSGTDFTLTISSLQPEDFATYYCQQTYSFPLTFGGG |
| | | TKVEIK |
| CD40L- | 2590 | DIQMTQSPSSLSASVGDRVTITCRASQSIGTFLNWYQQKPGKAPKLLIYG |
| 388 | | TSNLQSGVPSRFSGSGSGTDFTLTISSLQPEDFATYYCQQGYRTPLTFGGG |
| | | TKVEIK |
| CD40L- | 2591 | DIQMTQSPSSLSASVGDRVTITCRASESITTYLNWYQQKPGKAPKLLIYT |
| 389 | | ASGLQSGVPSRFSGSGSGTDFTLTISSLQPEDFATYYCQQSYTVPITFGGG |
| | | TKVEIK |
| CD40L- | 2592 | DIQMTQSPSSLSASVGDRVTITCRGSQSISSFLNWYQQKPGKAPKLLIYAA |
| 390 | | SKLHSGVPSRFSGSGSGTDFTLTISSLQPEDFATYYCQHSYSTPLTFGGGT |
| | | KVEIK |
| CD40L- | 2593 | DIQMTQSPSSLSASVGDRVTITCRASQSIGTFLNWYQQKPGKAPKLLIYG |
| 391 | | TSNLQSGVPSRFSGSGSGTDFTLTISSLQPEDFATYYCQQGYRTPLTFGGG |
| | | TKVEIK |
| CD40L- | 2594 | DIQMTQSPSSLSASVGDRVTITCRASQDIRNYLNWYQQKPGKAPKLLIYA |
| 392 | | TSSLQTGVPSRFSGSGSGTDFTLTISSLQPEDFATYYCQQSYGAPLTFGGG |
| | | TKVEIK |
| CD40L- | 2595 | DIQMTQSPSSLSASVGDRVTITCRASQTIGSYLNWYQQKPGKAPKLLIYS |
| 393 | | ASTLQTGVPSRFSGSGSGTDFTLTISSLQPEDFATYYCQQSYSPPLTFGGG |
| | | TKVEIK |
| CD40L- | 2596 | DIQMTQSPSSLSASVGDRVTITCRAGQSISSYLNWYQQKPGKAPKLLIYA |
| 394 | | SSTLQRGVPSRFSGSGSGTDFTLTISSLQPEDFATYYCQQSHSVPLTFGGG |
| | | TKVEIK |
| CD40L- | 2597 | DIQMTQSPSSLSASVGDRVTITCRASQSVSTYLNWYQQKPGKAPKLLIYA |
| 395 | | TSTLQGGVPSRFSGSGSGTDFTLTISSLQPEDFATYYCQQSYTPPITFGGGT |
| | | KVEIK |
| CD40L- | 2598 | DIQMTQSPSSLSASVGDRVTITCRASQRISRYLNWYQQKPGKAPKLLIYR |
| 396 | | ASTLQSGVPSRFSGSGSGTDFTLTISSLQPEDFATYYCQQSHSSPLTFGGG |
| | | TKVEIK |
| CD40L- | 2599 | DIQMTQSPSSLSASVGDRVTITCRASQNIYSYLNWYQQKPGKAPKLLIYA |
| 397 | | ASSLQTGVPSRFSGSGSGTDFTLTISSLQPEDFATYYCQQNYRSPLTFGGG |
| | | TKVEIK |
| CD40L- | 2600 | DIQMTQSPFSLSASVGDRVTITCRASQNILTYLNWYQQKPGKAPKLLIYG |
| 398 | | ASTLRSGVPSRFSGSGSGTDFTLTISSLQPEDFATYYCQQSYRLPLTFGGG |
| | | TKVEIK |
| CD40L- | 2601 | DIQMTQSPSSLSASVGDRVTITCRASQSISSYVSWYQQKPGKAPKLLIYD |
| 399 | | ASSLSGGVPSRFSGSGSGTDFTLTISSLQPEDFATYYCQQSYRIPLTFGGGT |
| | | KVEIK |
| CD40L- | 2602 | DIQMTQSPSSLSASVGDRVTITCRGSQSISSFLNWYQQKPGKAPKLLIYAA |
| 400 | | SKLHSGVPSRFSGSGSGTDFTLTISSLQPEDFATYYCQHSYSTPLTFGGGT |
| | | KVEIK |
| CD40L- | 2603 | DIQMTQSPSSLSASVGDRVTITCRGSQSISSFLNWYQQKPGKAPKLLIYAA |
| 401 | | SKLHSGVPSRFSGSGSGTDFTLTISSLQPEDFATYYCQHSYSTPLTFGGGT |
| | | KVEIK |
| CD40L- | 2604 | DIQMTQSPSSLSASVGDRVTITCRASQSIKSYLNWYQQKPGKAPKLLIYS |
| 402 | | ASSLLSGVPSRFSGSGSGTDFTLTISSLQPEDFATYYCQQSYTLPRTFGGG |
| | | TKVEIK |
| CD40L- | 2605 | DIQMTQSPSSLSASVGDRVTITCRASQTISPYLNWYQQKPGKAPKLLIYA |
| 403 | | ASTLQAGVPSRFSSSGSGTDFTLTISSLQPEDFATYYCQQSYSLPLTFGGG |
| | | TKVEIK |
| CD40L- | 2606 | DIQMTQSPSSLSASVGDRVTITCRASQTISYYLNWYQQKPGKAPKLLIYD |
| 404 | | ATSLQSGVPSRFSGSGSGTDFTLTISSLQPEDFATYYCQQTYSLPLTFGGG |
| | | TKVEIK |
| CD40L- | 2607 | DIQMTQSPSSLSAYVGDRVTITCRASQSIGIHLNWYQQKPGKAPKLLIYG |
| 405 | | ASRLQTGVPSRFSGSGSGTDFTLTISSLQPEDFATYYCQQSYSAPLTFGGG |
| | | TKVEIK |
| CD40L- | 2608 | DIQMTQSPSSLSASVGDRVTITCRASQSIGAYLNWYQQKPGKAPKLLIYD |
| 406 | | ASSLRSGVPSRFSGSGSGTDFTLTISSLQPEDFATYYCQQTYSNPITFGGGT |
| | | KVEIK |
| CD40L- | 2609 | DIQMTQSPSSLSASVGDRVTITCRASQNIAGYLNWYQQKPGKAPKLLIYG |
| 407 | | ASTLHTGVPSRFSGSGSGTDFTLTISSLQPEDFATYYCRQSYSTPLTFGGG |
| | | TKVEIK |
| CD40L- | 2610 | DIQMTQSPSSLSASVGDRVTITCRGSQSISSFLNWYQQKPGKAPKLLIYAA |
| 408 | | SKLHSGVPSRFSGSGSGTDFTLTISSLQPEDFATYYCQQSYSTPFTFGGGT |
| | | KVEIK |
| CD40L- | 2611 | DIQMTQSPSSLSASVGDRVTITCRASQSIGAYLNWYQQKPGKAPKLLIYD |
| 409 | | ASSLRSGVPSRFSGSGSGTDFTLTISSLQPEDFATYYCQQTYSNPITFGGGT |
| | | KVEIK |
| CD40L- | 2612 | DIQMTQSPFSLSASVGDRVTITCRASQNILTYLNWYQQKPGKAPKLLIYG |
| 410 | | ASTLRSGVPSRFSGSGSGTDFTLTISSLQPEDFATYYCQQSYRLPLTFGGG |
| | | TKVEIK |
| CD40L- | 2613 | DIQMTQSPSSLSASVGDRVTITCRASQSIGTFLNWYQQKPGKAPKLLIYG |
| 411 | | TSNLQSGVPSRFSGSGSGTDFTLTISSLQPEDFATYYCQQGYRTPLTFGGG |
| | | TKVEIK |
| CD40L- | 2614 | DIQMTQSPSSLSASVGDRVTITCRASQTIGSYLNWYQQKPGKAPKLLIYS |
| 412 | | ASTLQTGVPSRFSGSGSGTDFTLTISSLQPEDFATYYCQQSYSPPLTFGGG |
| | | TKVEIK |
| CD40L- | 2615 | DIQMTQSPSSLSASVGDRVTITCRASQTIGSYLHWYQQKPGKAPKLLIYG |
| 413 | | TSSLQSGVPSRFSGSGSGTDFTLTISSLQPEDFATYYCQQTYSPPPDFGGG |
| | | TKVEIK |
| CD40L- | 2616 | DIQMTQSPSSLSASVGDRVTITCRASQSIGTFLNWYQQKPGKAPKLLIYG |
| 414 | | TSNLQSGVPSRFSGSGSGTDFTLTISSLQPEDFATYYCQQGYRTPLTFGGG |
| | | TKVEIK |
| CD40L- | 2617 | DIQMTQSPSSLSASVGDRVTITCRASQSLSTYLNWYQQKPGKAPKLLIYA |
| 415 | | ASSLHSGVPSRFSGSGSGTDFTLTISSLQPEDFATYYCQQSYSTPPEYTFG |
| | | GGTKVEIK |
| CD40L- | 2618 | DIQMTQSPSSLSASVGDRVTITCRASQYISTYLNWYQQKPGKAPKLLIYA |
| 416 | | ASTLETGVPSRFSGSGSGTDFTLTISSLQPEDFATYYCQQSYSIPPVTFGGG |
| | | TKVEIK |
| CD40L- | 2619 | DIQMTQSPSSLSASVGDRVTITCRGSQSISSFLNWYQQKPGKAPKLLIYAA |
| 417 | | SKLHSGVPSRFSGSGSGTDFTLTISSLQPEDFATYYCQHSYSTPLTFGGGT |
| | | KVEIK |
| CD40L- | 2620 | DIQMTQSPSSLSASVGDRVTITCRASESITTYLNWYQQKPGKAPKLLIYT |
| 418 | | ASGLQSGVPSRFSGSGSGTDFTLTISSLQPEDFATYYCQQSYTVPITFGGG |
| | | TKVEIK |
| CD40L- | 2621 | DIQMTQSPSSLSASVGDRVTITCRAGQSISSYLNWYQQKPGKAPKLLIYA |
| 419 | | SSTLQRGVPSRFSGSGSGTDFTLTISSLQPEDFATYYCQQSHSVPLTFGGG |
| | | TKVEIK |
| CD40L- | 2622 | DIQMTQSPSSLSASVGDRVTITCRASQSIGAYLNWYQQKPGKAPKLLIYD |
| 420 | | ASSLRSGVPSRFSGSGSGTDFTLTISSLQPEDFATYYCQQSYETPLTFGGG |
| | | TKVEIK |
| CD40L- | 2623 | DIQMTQSPSSLSASVGDRVTITCRGSQSISSFLNWYQQKPGKAPKLLIYAA |
| 421 | | SKLHSGVPSRFSGSGSGTDFTLTISSLQPEDFATYYCQHSYSTPLTFGGGT |
| | | KVEIK |
| CD40L- | 2624 | DIQMTQSPSSLSASVGDRVTITCRASQSVSRFLNWYQQKPGKAPKLLIYA |
| 422 | | ASTLQPGVPSRFSGSGSGTDFTLTISSLQPEDFATYYCQQSYETPLTFGGG |
| | | TKVEIK |
| CD40L- | 2625 | DIQMTQSPSSLSASVGDRVTITCRASQPISSYLNWYQQKPGKAPKLLIYA |
| 423 | | ASNLQTGVPSRFSGSGSGTDFTLTISSLQPEDFATYYCQQSYSPPITFGGG |
| | | TKVEIK |
| CD40L- | 2626 | DIQMTQSPSSLSASVGDRVTITCRASQSIGTFLNWYQQKPGKAPKLLIYG |
| 424 | | TSNLQSGVPSRFSGSGSGTDFTLTISSLQPEDFATYYCQQGYRTPLTFGGG |
| | | TKVEIK |
| CD40L- | 2627 | DIQMTQSPSSLSASVGDRVTITCRASQGIDNYLNWYQQKPGKAPKLLIYA |
| 425 | | TSRLQSGVPSRFSGSGSGTDFTLTISSLQPEDFATYYCQQSYSVPLTFGGG |
| | | TKVEIK |
| CD40L- | 2628 | DIQMTQSPSSLSASVGDRVTITCRASESITTYLNWYQQKPGKAPKLLIYT |
| 426 | | ASGLQSGVPSRFSGSGSGTDFTLTISSLQPEDFATYYCQQGYRTPLTFGGG |
| | | TKVEIK |
| CD40L- | 2629 | DIQMTQSPSSLSASVGDRVTITCRASQSIGTFLNWYQQKPGKAPKLLIYG |
| 427 | | TSNLQSGVPSRFSGSGSGTDFTLTISSLQPEDFATYYCQQGYRTPLTFGGG |
| | | TKVEIK |
| CD40L- | 2630 | DIQMTQSPSSLSASVGDRVTITCRASESITTYLNWYQQKPGKAPKLLIYT |
| 428 | | ASGLQSGVPSRFSGSGSGTDFTLTISSLQPEDFATYYCQQSYTVPITFGGG |
| | | TKVEIK |
| CD40L- | 2631 | DIQMTQSPSSLSASVGDRVTITCRASQTISYYLNWYQQKPGKAPKLLIYD |
| 429 | | ATSLQSGVPSRFSGSGSGTDFTLTISSLQPEDFATYYCQQTYSLPLTFGGG |
| | | TKVEIK |
| CD40L- | 2632 | DIQMTQSPSSLSASVGDRVTITCRASQTISNFLNWYQQKPGKAPKLLIYA |
| 430 | | ASTLQYGVPSRFSGSGSGTDFTLTISSLQPEDFATYYCQQNYRSPLTFGGG |
| | | TKVEIK |
| CD40L- | 2633 | DIQMTQSPSSLSASVGDRVTITCRASQSVSRFLNWYQQKPGKAPKLLIYA |
| 431 | | ASTLQPGVPSRFSGSGSGTDFTLTISSLQPEDFATYYCQQSYETPLTFGGG |
| | | TKVEIK |
| CD40L- | 2634 | DIQMTQSPSSLSASVGDRVTITCRASQSISNYLHWYQQKPGKAPKLLIYG |
| 432 | | ASILQSGVPSRFSGSGSGTDFTLTISSLQPEDFATYYCQHSYSTPLTFGGGT |
| | | KVEIK |
| CD40L- | 2635 | DIQMTQSPSSLSASVGDRVTITCRASESITTYLNWYQQKPGKAPKLLIYT |
| 433 | | ASGLQSGVPSRFSGSGSGTDFTLTISSLQPEDFATYYCQQSYTVPITFGGG |
| | | TKVEIK |
| CD40L- | 2636 | DIQMTQSPSSLSASVGDRVTITCRASQSVSRFLNWYQQKPGKAPKLLIYA |
| 434 | | ASTLQPGVPSRFSGSGSGTDFTLTISSLQPEDFATYYCQQSYETPLTFGGG |
| | | TKVEIK |
| CD40L- | 2637 | DIQMTQSPSSLSASVGDRVTITCRASQSIGTFLNWYQQKPGKAPKLLIYG |
| 435 | | TSNLQSGVPSRFSGSGSGTDFTLTISSLQPEDFATYYCQQGYRTPLTFGGG |
| | | TKVEIK |
| CD40L- | 2638 | DIQMTQSPSSLSASVGDRVTITCRASQNINKYLNWYQQKPGKAPKLLIYL |
| 436 | | ASTLHSGVPSRFSGSGSGTDFTLTISSLQPEDFATYYCQQSHSIPRTFGGGT |
| | | KVEIK |
| CD40L- | 2639 | DIQMTQSPSSLSASVGDRVTITCRASQTISNFLNWYQQKPGKAPKLLIYA |
| 437 | | ASTLQYGVPSRFSGSGSGTDFTLTISSLQPEDFATYYCQQTYSFPLTFGGG |
| | | TKVEIK |
| CD40L- | 2640 | DIQMTQSPSSLSASVGDRVTITCRASESITTYLNWYQQKPGKAPKLLIYT |
| 438 | | ASGLQSGVPSRFSGSGSGTDFTLTISSLQPEDFATYYCQQSYTVPITFGGG |
| | | TKVEIK |
| CD40L- | 2641 | DIQMTQSPSSLSASVGDRVTITCRASQSISTYVNWYQQKPGKAPKLLIYT |
| 439 | | ASSLQGGVPSRFSGSGSGTDFTLTISSLQPEDFATYYCQQSYTTPWTFGG |
| | | GTKVEIK |
| CD40L- | 2642 | DIQMTQSPSSLSASVGDRVTITCRGSQSISSFLNWYQQKPGKAPKLLIYAA |
| 440 | | SKLHSGVPSRFSGSGSGTDFTLTISSLQPEDFATYYCQHSYSTPLTFGGGT |
| | | KVEIK |
| CD40L- | 2643 | DIQMTQSPSSLSASVGDRVTITCRASESITTYLNWYQQKPGKAPKLLIYT |
| 441 | | ASGLQSGVPSRFSGSGSGTDFTLTISSLQPEDFATYYCQQSYTVPITFGGG |
| | | TKVEIK |

[0200] While preferred embodiments of the present disclosure have been shown and described herein, it will be obvious to those skilled in the art that such embodiments are provided by way of example only. Numerous variations, changes, and substitutions will now occur to those skilled in the art without departing from the disclosure. It should be understood that various alternatives to the embodiments of the disclosure described herein may be employed in practicing the disclosure. It is intended that the following claims define the scope of the disclosure and that methods and structures within the scope of these claims and their equivalents be covered thereby.

The application's sequence listing, which the Patent Office published only in electronic form, follows.

SEQUENCE LISTING (2647 sequences)

SEQ ID NO: 1 - protein, 116 aa, synthetic construct
EVQLVESGGGLVQPGGSLRLSCAASGSAFRSTVMGWFRQAPGKEREGVSFISGSDGSTYYADSVKGRFTISADNSKNTAYLQMNSLKPEDTAVYYCAADAPAGYYWGQGTLVTVSS

SEQ ID NO: 2 - protein, 112 aa, synthetic construct
EVQLVESGGGLVQPGGSLRLSCAASGLTFSTTVMGWFRQAPGKEREWVATIAGDGSTFYADSVKGRFTISADNSKNTAYLQMNSLKPEDTAVYYCADINEDWGQGTLVTVSS

SEQ ID NO: 3 - protein, 114 aa, synthetic construct
EVQLVESGGGLVQPGGSLRLSCAASGRIFSTYFMGWFRQAPGKERELVSAIFSDGSTYYADSVKGRFTISADNSKNTAYLQMNSLKPEDTAVYYCALDLSTVRWGQGTLVTVSS

SEQ ID NO: 4 - protein, 115 aa, synthetic construct
EVQLVESGGGLVQPGGSLRLSCAASGFTFSSYWMGWFRQAPGKERELVSAIFSDGSTMYADSVKGRFTISADNSKNTAYLQMNSLKPEDTAVYYCTRDSTDTRYWGQGTLVTVSS

SEQ ID NO: 5 - protein, 119 aa, synthetic construct
EVQLVESGGGLVQPGGSLRLSCAASGVTLDTDAMGWFRQAPGKEREFVAWINNRGTTDYADSVKGRFTISADNSKNTAYLQMNSLKPEDTAVYYCARVSQWLLGGPANWGQGTLVTVSS

SEQ ID NO: 6 - protein, 126 aa, synthetic construct
EVQLVESGGGLVQPGGSLRLSCAASGMTFSSYVMGWFRQAPGKEREFVGEIILSKGFTYYADSVKGRFTISADNSKNTAYLQMNSLKPEDTAVYYCASGPGYYDSSAYYLYAFDIWGQGTLVTVSS

SEQ ID NO: 7 - protein, 117 aa, synthetic construct
EVQLVESGGGLVQPGGSLRLSCAASGLTFGTHVMGWFRQAPGKERELVTAINPAALTTYYADSVKGRFTISADNSKNTAYLQMNSLKPEDTAVYYCARDFWSAGDSWGQGTLVTVSS

SEQ ID NO: 8 - protein, 117 aa, synthetic construct
EVQLVESGGGLVQPGGSLRLSCAASGRIFSTYFMGWFRQAPGKERELVSAIFSDGSTYYADSVKGRFTISADNSKNTAYLQMNSLKPEDTAVYYCAKELEGDAFDVWGQGTLVTVSS

SEQ ID NO: 9 - protein, 114 aa, synthetic construct
EVQLVESGGGLVQPGGSLRLSCAASGPMSSSAVMGWFRQAPGKEREAVALGWSGGSTYYADSVKGRFTISADNSKNTAYLQMNSLKPEDTAVYYCAIHTSREIWGQGTLVTVSS

SEQ ID NO: 10 - protein, 117 aa, synthetic construct
EVQLVESGGGLVQPGGSLRLSCAASGFTLDDYVMGWFRQAPGKEREGVATIAGGGTYYADSVKGRFTISADNSKNTAYLQMNSLKPEDTAVYYCASSGSYYPGHFEWGQGTLVTVSS

SEQ ID NO: 11 - protein, 115 aa, synthetic construct
EVQLVESGGGLVQPGGSLRLSCAASGFTFDDSDMGWFRQAPGKEREFVGAISWSGDSTYYKYYADSVKGRFTISADNSKNTAYLQMNSLKPEDTAVYYCANQYGWGQGTLVTVSS

SEQ ID NO: 12 - protein, 114 aa, synthetic construct
EVQLVESGGGLVQPGGSLRLSCAASGFIFSSYWMGWFRQAPGKERELVSAIFSDGSTYYADSVKGRFTISADNSKNTAYLQMNSLKPEDTAVYYCAIDWYLNSWGQGTLVTVSS

SEQ ID NO: 13 - protein, 115 aa, synthetic construct
EVQLVESGGGLVQPGGSLRLSCAASGFTFDDNDMGWFRQAPGKEREFVGAISWSGNTTYYKYYADSVKGRFTISADNSKNTAYLQMNSLKPEDTAVYYCSNQYGWGQGTLVTVSS

SEQ ID NO: 14 - protein, 114 aa, synthetic construct
EVQLVESGGGLVQPGGSLRLSCAASGSIFSSYWMGWFRQAPGKERELVSAIFSDGSTYYADSVKGRFTISADNSKNTAYLQMNSLKPEDTAVYYCAKDYFGTGWGQGTLVTVSS

SEQ ID NO: 15 - protein, 115 aa, synthetic construct
EVQLVESGGGLVQPGGSLRLSCAASGFILDDYAMGWFRQAPGKEREFVATIAGGYTYYADSVKGRFTISADNSKNTAYLQMNSLKPEDTAVYYCPVFDGYTRIHWGQGTLVTVSS

SEQ ID NO: 16 - protein, 115 aa, synthetic construct
EVQLVESGGGLVQPGGSLRLSCAASGFSLDDYAMGWFRQAPGKEREGVATIAGGYTYYADSVKGRFTISADNSKNTAYLQMNSLKPEDTAVYYCAAFDGYTGSDWGQGTLVTVSS

SEQ ID NO: 17 - protein, 121 aa, synthetic construct
EVQLVESGGGLVQPGGSLRLSCAASGTTFEIYPMGWFRQAPGKEREFVAAIHWNSGITYYADSVKGRFTISADNSKNTAYLQMNSLKPEDTAVYYCARDVFYFDSSGYSLWGQGTLVTVSS

SEQ ID NO: 18 - protein, 118 aa, synthetic construct
EVQLVESGGGLVQPGGSLRLSCAASGNIFTRNIMCWFRQAPGKEREGVSCISTGDGSTYYADSVKGRFTISADNSKNTAYLQMNSLKPEDTAVYYCAADSETSGNWVWGQGTLVTVSS

SEQ ID NO: 19 - protein, 118 aa, synthetic construct
EVQLVESGGGLVQPGGSLRLSCAASGFILDYYVMGWFRQAPGKERELVSAIFSDGSTLYADSVKGRFTIIADNSKNTAYLQMNSLKPEDTAVYYCAKGGYTGCWSYDWGQGTLVTVSS

SEQ ID NO: 20 - protein, 111 aa, synthetic construct
EVQLVESGGGLVQPGGSLRLSCAASGFKLGYYAMGWFRQAPGKEREGVATIAGGTTYYADSVKGRFTISADNSKNTAYLQMNSLKPEDTAVYYCAAIGWRWGQGTLVTVSS

SEQ ID NO: 21 - protein, 118 aa, synthetic construct
EVQLVESGGGLVQPGGSLRLSCAASGNIFSRYIMGWFRQAPGKERELVSAIFSDGSTLYADSVKGRFTISADNSKNTAYLQMNSLKPEDTAVYYCAKGGYSSGWFDYWGQGTLVTVSS

SEQ ID NO: 22 - protein, 118 aa, synthetic construct
EVQLVESGGGLVQPGGSLRLSCAASGRTFRSYVMGWFRQAPGKERELVSAIFSDGSTLYADSVKGRFTISADNSKNTAYLQMNSLKPEDTAVYYCAREDSSSGWFDYWGQGTLVTVSS

SEQ ID NO: 23 - protein, 114 aa, synthetic construct; identical to SEQ ID NO: 3

SEQ ID NO: 24 - protein, 115 aa, synthetic construct
EVQLVESGGGLVQPGGSLRLSCAASGGIFSINDIGWFRQAPGKEREFVAALSWIIGSGVYTYYADSVKGRFTISADNSKNTAYLQMNSLKPEDTAVYYCANEYGWGQGTLVTVSS

SEQ ID NO: 25 - protein, 118 aa, synthetic construct
EVQLVESGGGLVQPGGSLRLSCAASGHIFSRYIMGWFRQAPGKERELVSAIFSDGSTLYADSVKGRFTISADNSKNTAYLQMNSLKPEDTAVYYCAQGGYGGGWFDYWGQGTLVTVSS

SEQ ID NO: 26 - protein, 118 aa, synthetic construct
EVQLVESGGGLVQPGGSLRLSCAASGLTFSSYIMGWFRQAPGKERELVSAIFSDGSTLYADSVKGRFTISADNSKNTAYLQMNSLKPEDTAVYYCARDDYGGNFFDYWGQGTLVTVSS

SEQ ID NO: 27 - protein, 114 aa, synthetic construct
EVQLVESGGGLVQPGGSLRLSCAASGSTFSDRAMGWFRQAPGKERELVSAIFSDGSTLYADSVKGRFTISADNSKNTAYLQMNSLKPEDTAVYYCASDVGMDVWGQGTLVTVSS

SEQ ID NO: 28 - protein, 115 aa, synthetic construct
EVQLVESGGGLVQPGGSLRLSCAASGFTFDDYEMGWFRQAPGKEREFVGSIGCDGSTLYADSVKGRFTISADNSKNTAYLQMNSLKPEDTAVYYCTTDCDDHCGWGQGTLVTVSS

SEQ ID NO: 29 - protein, 115 aa, synthetic construct
EVQLVESGGGLVQPGGSLRLSCAASGFTFDDYDMGWFRQAPGKEREFVGAISWSGDSTYYKYYADSVKGRFTISADNSKNTAYLQMNNLKPEDTAVYYCANQYGWGQGTLVTVSS

SEQ ID NO: 30 - protein, 129 aa, synthetic construct
EVQLVESGGGLVQPGGSLRLSCAASGRTFSTYGMGWFRQAPGKEREFVAAMISWNGGSSTYYADSVKGRFTISADNSKNTAYLQMNSLKPEDTAVYYCTTDPAEFYDSSTYYPAPFDYWGQGTLVTVSS

SEQ ID NO: 31 - protein, 119 aa, synthetic construct
EVQLVESGGGLVQPGGSLRLSCAASGNIFANNIMGWFRQAPGKERELVSAIFSDGSTYYADSVKGRFTISADNSKNTAYLQMNSLKPEDTAVYYCARDDIVGAWSLDCWGQGPLMTVSS

SEQ ID NO: 32 - protein, 120 aa, synthetic construct
EVQLVESGGGLVQPGGSLRLSCAASGNSFNNYVMGWFRQAPGKEREMVSAIFSDGSTYYADSVKGRFTISADNSKNTAYLQMNSLKPEDTAVYYCVRDSGSVSGQTFDSWGQGTLVTVSS

SEQ ID NO: 33 - protein, 119 aa, synthetic construct
EVQLVESGGGLVQPGGSLRLSCAASGFSLDYYGMGWFRQAPGKEREFVAAIHWNGDSTLYADSVKGRFTIIADNSKNTAYLQMNSLKPEDTAVYYCARGFSGWFPFDYWGQGTLVTVSS

SEQ ID NO: 34 - protein, 119 aa, synthetic construct
EVQLVESGGGLVQPGGSLRLSCAASGHIFANNIMGWFRQAPGKERELVSAIFSDGSTYYADSVKGRFTISADNSKNTAYLQMNSLKPEDTAVYYCARDAIVGAASLDYWGQGTLVTVSS

SEQ ID NO: 35 - protein, 114 aa, synthetic construct
EVQLVESGGGLVQPGGSLRLSCAASGCIFSTYFMGWFRQAPGKERELVSAIFSDGSTYYADSVKGRFTISADNSKNTAYLQMNSLKPEDTAVYYCALDWNLNRWGQGTLVTVSS

SEQ ID NO: 36 - protein, 113 aa, synthetic construct
EVQLVESGGGLVQPGGSLRLSCAASGGTLDDYVMGWFRQAPGKEREFVGFIGSDGSTLYADSVKGRFTISADNSKNTAYLQMNSLKPEDTAVYYCTTEWDGYWGQGTLVTVSS

SEQ ID NO: 37 - protein, 115 aa, synthetic construct
EVQLVESGGGLVQPGGSLRLSCAASGFPLDDYAMGWFRQAPGKEREFVGAISGSGDDTYYEDSVKGRFTISADNSKNTAYLQMNSLKPEDTAVYYWVDPYSSSRWGQGTLVTVSS

SEQ ID NO: 38 - protein, 118 aa, synthetic construct
EVQLVESGGGLVQPGGSLRLSCAASGFSLDYYAMGWFRQAPGKERELVSAIFSDGSALYADSVKGRFTISADNSKNTAYLQMNSLKPEDTAVYYCAKDRDTGIGAYDWGQGTLVTVSS

SEQ ID NO: 39 - protein, 113 aa, synthetic construct
EVQLVESGGGLVQPGGSLRLSCAASGFGIDAMGWFRQAPGKERELVSAIFIDGDTYYADSVKGRFTISADNSKNTAYLQMNSLKPEDTAVYYCVRDDWGPSFWGQGTLVTVSS

SEQ ID NO: 40 - protein, 115 aa, synthetic construct
EVQLVESGGGLVQPGGSLRLSCAASGLTFSRYAMGWFRQAPGKEREFVSAIFSDGSTYYADSVKGRFTISADNSKNTAYLQMNSLKPEDTAVYYCARGPNWFDPWGQGTLVTVSS

SEQ ID NO: 41 - protein, 123 aa, synthetic construct
EVQLVESGGGLVQPGGSLRLSCAASGRTFSAHSVYTMGWFRQAPGKEREWVSAIFSDGDTYYADSVKGRFTISADNSKNTAYLQMNSLKPEDTAVYYCAIDEGMDYDGNFYDWGQGTLVTVSS

SEQ ID NO: 42 - protein, 119 aa, synthetic construct
EVQLVESGGGLVQPGGSLRLSCAASGFILNYYGMGWFRQAPGKERELVTAIFCNGSTSYADSVKGRFTISADNSKNTAYLQMNSLKPEDTAVYYCWAHGFSGWFPFDYWGQGTLVTVSS

SEQ ID NO: 43 - protein, 118 aa, synthetic construct
EVQLVESGGGLVQPGGSLRLSCAASGLTFSSYSMGWFRQAPGKERELVSAIFSDGSTLYADSVKGRFTISADNSKNTAYLQMNSLKPEDTAVYYCARDDYGGNFFDYWGQGTLVTVSS

SEQ ID NO: 44 - protein, 114 aa, synthetic construct
EVQLVESGGGLVQPGGSLRLSCAASGRTLDRYGMGWFRQAPGKEREFVAAISWSGGHTLYADSVKGRFTISADNSKNTAYLQMNSLKPEDTAVYYCAIGGSLSWGQGTLVTVSS

SEQ ID NO: 45 - protein, 119 aa, synthetic construct
EVQLVESGGGLVQPGGSLRLSCAASGNIFANNIMGWFRQAPGKERELVSAIFSDGSTYYADSVKGRFTISADNSKNTAYLQMNSLKPEDTAVYYCARDAIVGAASLDYWGQGTLVTVSS

SEQ ID NO: 46 - protein, 119 aa, synthetic construct
EVQLVESGGGLVQPGGSLRLSCAASGFSLDYYGMGWFRQAPGKEREFVAAIHWNGDSTLYADSVKGRFTISADNSKNTAYLQMNSLKPEDTAVYYCARGFSGWFPFDYWGQGTLVTVSS

SEQ ID NO: 47 - protein, 115 aa, synthetic construct
EVQLVESGGGLVQPGGSLRLSCAASGSIFSINDMGWFRQAPGKEREFVAAIDWSGDSTYYKYYADSVKGRFTISADNSKNTAYLQMNSLKPEDTAVYYCANQYGWGQGTLVTVSS

SEQ ID NO: 48 - protein, 113 aa, synthetic construct
EVQLVESGGGLVQPGGSLRLSCAASGRTFSNTLMCWFRQAPGKEREGVSCITNDGSTYYADSVKGRFTISADNSKNTAYLQMNSLKPEDTAVYYCAIDPDGEWGQGTLVTVSS

SEQ ID NO: 49 - protein, 119 aa, synthetic construct
EVQLVESGGGLVQPGGSLRLSCAASGRTFSNYAIVMGWFRQAPGKEREFVGAIDWSGGSTYYADSVKGRFTISADNSKNTAYLQMNSLKPEDTAVYYCAVISGLVQRDWGQGTLVTVSS

SEQ ID NO: 50 - protein, 114 aa, synthetic construct
EVQLVESGGGLVQPGGSLRLSCAASGGIFSINDIGWFRQAPGKEREFVAALSIIGSGVYTYYADSVKGRFTISADNSKNTAYLQMNSLKPEDTAVYYCANEYGWGQGTLVTVSS

SEQ ID NO: 51 - protein, 116 aa, synthetic construct
EVQLVESGGGLVQPGGSLRLSCAASGGTFSNYAMGWFRQAPGKERELVAASRWSGGIKYYADSVKGRFTISADNSKNTAYLQMNSLKPEDTAVYYCAAKTGTSFVWGQGTLVTVSS

SEQ ID NO: 52 - protein, 118 aa, synthetic construct
EVQLVESGGGLVQPGGSLRLSCAASGISISTEVMGWFRQAPGKEREGVSFISGSDGSTYYADSVKGRFTISADNSKNTAYLQMNSLKPEDTAVYYCAADSPGGRSYEWGQGTLVTVSS

SEQ ID NO: 53 - protein, 117 aa, synthetic construct
EVQLVESGGGLVQPGGSLRLSCAASGRTFSSNVMGWFRQAPGKEREFLATIISDGTKYYADSVKGRFTISADNSKNTAYLQMNSLKPEDTAVYYCAADSETSGNWVWGQGTLVTVSS

SEQ ID NO: 54 - protein, 115 aa, synthetic construct
EVQLVESGGGLVQPGGSLRLSCAASGRAFSRSVSTMGWFRQAPGKERELVSAIFSDGSTLYADSVKGRFTISADNSKNTAYLQMNSLKPEDTAVYYCTTDLQDYWGQGTLVTVSS

SEQ ID NO: 55 - protein, 118 aa, synthetic construct
EVQLVESGGGLVQPGGSLRLSCAASGFTLGDYVMGWFRQAPGKEREGVSFISGSDGSTYYADSVKGRFTISADNSKNTAYLQMNSLKPEDTAVYYCAADGPGGRSYEWGQGTLVTVSS

SEQ ID NO: 56 - protein, 119 aa, synthetic construct
EVQLVESGGGLVQPGGSLRLSCAASGFTFSDTTMGWFRQAPGKEREFVGTMVWSSDTIYYADSVKGRFTISADNSKNTAYLQMNSLKPEDTAVYYCAFSPAYSPYFHLWGQGTLVTVSS

SEQ ID NO: 57 - protein, 111 aa, synthetic construct
EVQLVESGGGLVQPGGSLRLSCAASGFTFGDYAMGWFRQAPGKEREFVAGIESGGYTYYADSVKGRFTISADNSKNTAYLQMNSLKPEDTAVYYCANQYGWGQGTLVTVSS

SEQ ID NO: 58 - protein, 118 aa, synthetic construct
EVQLVESGGGLVQPGGSLRLSCAASGNTFSGGFMGWFRQAPGKEREFLATIISDGTTYYADSVKGRFTISADNSKNTAYLQMNSLKPEDTAVYYCTTDSGSYYGMDVWGQGTLVTVSS

SEQ ID NO: 59 - protein, 113 aa, synthetic construct
EVQLVESGGGLVQPGGSLRLSCAASGSTFSDYVMGWFRQAPGKEREGVSFISGSDGSTYYADSVKGRFTISADNSKNTAYLQMNSLKPEDTAVYYCARDFQYWGQGTLVTVSS

SEQ ID NO: 60 - protein, 117 aa, synthetic construct
EVQLVESGGGLVQPGGSLRLSCAASGVTLDTYAMGWFRQAPGKEREMVSAIFSDGSTYYADSVKGRFTISADNSKNTAYLQMNSLKPEDTAVYYCAADSPGGRSYEWGQGTLVTVSS

SEQ ID NO: 61 - protein, 114 aa, synthetic construct
EVQLVESGGGLVQPGGSLRLSCAASGFTFDDSDMGWFRQAPGKEREFVAAMNWSGVTTYHYYADSVKGRFTISADNSKNTAYLQMNSLKPEDTAVYYCANQYGWGQGTLVTVSS

SEQ ID NO: 62 - protein, 112 aa, synthetic construct
EVQLVESGGGLVQPGGSLRLSCAASGFTLDDSAMGWFRQAPGKEREGVAAISSRDGSTYYADSVKGRFTISADNSKNTAYLQMNSLKPEDTAVYYCTTFDDWGQGTLVTVSS

SEQ ID NO: 63 - protein, 116 aa, synthetic construct
EVQLVESGGGLVQPGGSLRLSCAASGRTWNDLDMGWFRQAPGKEREFVAAISGWSGGNIDYTYYADSVKGRFTISADNSKNTAYLQMNSLKPEDTAVYYCANQYGWGQGTLVTVSS

SEQ ID NO: 64 - protein, 114 aa, synthetic construct
EVQLVESGGGLVQPGGSLRLSCAASGSTGYMGWFRQAPGKEREGVSAIFSDGSTYYADSVKGRFTISADNSKNTAYLQMNSLKPEDTAVYYCAAGSDASGGYDWGQGTLVTVSS

SEQ ID NO: 65 - protein, 113 aa, synthetic construct
EVQLVESGGGLVQPGGSLRLSCAASGFTLGDYVMGWFRQAPGKEREGVAAISSRDGSTYYADSVKGRFTISADNSKNTAYLQMNSLKPEDTAVYYCARDLADWGQGTLVTVSS

SEQ ID NO: 66 - protein, 116 aa, synthetic construct
EVQLVESGGGLVQPGGSLRLSCAASGSTFSKAVMGWFRQAPGKEREGVSFISGSDGSTYYADSVKGRFTISADNSKNTAYLQMNSLKPEDTAVYYCTRFGESTDVWGQGTLVTVSS

SEQ ID NO: 67 - protein, 114 aa, synthetic construct
EVQLVESGGGLVQPGGSLRLSCAASGNIFSHNAMGWFRQAPGKEREWVSAIFSDGSTYYADSVKGRFTISADNSKNTAYLQMNSLKPEDTAVYYCALDIDYRDWGQGTLVTVSS

SEQ ID NO: 68 - protein, 112 aa, synthetic construct
EVQLVESGGGLVQPGGSLRLSCAASGFGIDAMGWFRQAPGKERELVSAIFSDGDTYADSVKGRFTISADNSKNTAYLQMNSLKPEDTAVYYCVRDDWGPSFWGQGTLVTVSS

SEQ ID NO: 69 - protein, 115 aa, synthetic construct
EVQLVESGGGLVQPGGSLRLSCAASGPTFDTYAMGWFRQAPGKEREHVAAIFSDGSTYYADSVKGRFTISADNSKNTAYLQMNSLKPEDTAVYYCARDYGDVDSWGQGTLVTVSS

SEQ ID NO: 70 - protein, 118 aa, synthetic construct
EVQLVESGGGLVQPGGSLRLSCAASGRSFSSYAMGWFRQAPGKEREFVAAIFSDGSTYYADSVKGRFTISADNSKNTAYLQMNSLKPEDTAVYYCAREDSSSSWFDPWGQGTLVTVSS

SEQ ID NO: 71 - protein, 114 aa, synthetic construct
EVQLVESGGGLVQPGGSLRLSCAASGRTSSSVTMGWFRQAPGKEREWMGVIAYDGSTYADSVKGRFTISADNSKNTAYLQMNSLKPEDTAVYYCARSDGGLDYWGQGTLVTVSS

SEQ ID NO: 72 - protein, 115 aa, synthetic construct
EVQLVESGGGLVQPGGSLRLSCAASGDYYAMGWFRQAPGKERELVSAIFSDGSTYYADSVKGRFTISADNSKNTAYLQMNSLKPEDTAVYYCARDGEGQDLLDYWGQGTLVTVSS

SEQ ID NO: 73 - protein, 118 aa, synthetic construct
EVQLVESGGGLVQPGGSLRLSCAASGRRFISNYAMGWFRQAPGKERELVAATGRRGGPTYYADSVKGRFTISADNSKNTAYLQMNSLKPEDTAVYYCAVISGLVQRDWGQGTLVTVSS

SEQ ID NO: 74 - protein, 113 aa, synthetic construct
EVQLVESGGGLVQPGGSLRLSCAASGGTLVNYDMGWFRQAPGKEREFVAGITSSGGYTYYADSVKGRFTISADNSKNTAYLQMNSLKPEDTAVYYCAREGGLWGQGTLVTVSS

SEQ ID NO: 75 - protein, 114 aa, synthetic construct
EVQLVESGGGLVQPGGSLRLSCAASGFTFSNYWMGWFRQAPGKERELVSAIFSDGSTYYADSVKGRFTISADNSKNTAYLQMNSLKPEDTAVYYCAIDWYLNSWGQGTLVTVSS

SEQ ID NO: 76 - protein, 110 aa, synthetic construct
EVQLVESGGGLVQPGGSLRLSCAASGRTFSMGWFRQAPGKEREFVAAITWGGSTTLYADSVKGRFTISADNSKNTAYLQMNSLKPEDTAVYYCAVPNGNWGQGTLVTVSS

SEQ ID NO: 77 - protein, 117 aa, synthetic construct
EVQLVESGGGLVQPGGSLRLSCAASGGRIFSTYFMGWFRQAPGKEREWVSAIFSDGSTYYADSVKGRFTISADNSKNTAYLQMNSLKPEDTAVYYCARDVAGALDYWGQGTLVTVSS

SEQ ID NO: 78 - protein, 112 aa, synthetic construct
EVQLVESGGGLVQPGGSLRLSCAASGRTSRSYGMGWFRQAPGKEREFVGEIILSKGFTYYADSVKGRFTISADNSKNTAYLQMNSLKPEDTAVYYCANQYGWGQGTLVTVSS

SEQ ID NO: 79 - protein, 118 aa, synthetic construct
EVQLVESGGGLVQPGGSLRLSCAASGRTSNIYAMGWFRQAPGKERELVSAIFSDGSTYYADSVKGRFTISADNSKNTAYLQMNSLKPEDTAVYYCARNGYSSSWFDYWGQGTLVTVSS

SEQ ID NO: 80 - protein, 124 aa, synthetic construct
EVQLVESGGGLVQPGGSLRLSCAASGFTFSSYYMGWFRQAPGKERELVALIHTGGGTYYADSVKGRFTISADNSKNTAYLQMNSLKPEDTAVYYCAAGASFGSIFWESAREYNWGQGTLVTVSS

SEQ ID NO: 81 - protein, 115 aa, synthetic construct
EVQLVESGGGLVQPGGSLRLSCAASGRTLSDHDMGWFRQAPGKEREFVAAINYSGGSTYYKYYADSVKGRFTISADNSKNTAYLQMNSLKPEDTAVYYCANQYGWGQGTLVTVSS

SEQ ID NO: 82 - protein, 118 aa, synthetic construct
EVQLVESGGGLVQPGGSLRLSCAASGFAFSTRVMGWFRQAPGKEREGVSFISGSDGSTYYADSVKGRFTISADNSKNTAYLQMNSLKPEDTAVYYCAAVSSNSETFDWGQGTLVTVSS

SEQ ID NO: 83 - protein, 110 aa, synthetic construct
EVQLVESGGGLVQPGGSLRLSCAASGFSLDDYAMGWFRQAPGKEREGVATIAGGYTYYADSVKGRFTISADNSKNTAYLQMNSLKPEDTAVYYCANQYGWGQGTLVTVSS

SEQ ID NO: 84 - protein, 114 aa, synthetic construct
EVQLVESGGGLVQPGGSLRLSCAASGRTFSVYAMGWFRQAPGKERELVSAIFSDGTTYYADSVKGRFTISADNSKNTAYLQMNSLKPEDTAVYYCALDLSTVRWGQGTLVTVSS

SEQ ID NO: 85 - protein, 115 aa, synthetic construct
EVQLVESGGGLVQPGGSLRLSCAASGFTFDDYDMGWFRQAPGKEREFVAAISWTGDSTYYKYYADSVKGRFTISADNSKNTAYLQMNSLKPEDTAVYYCANQYGWGQGTLVTVSS

SEQ ID NO: 86 - protein, 113 aa, synthetic construct
EVQLVESGGGLVQPGGSLRLSCAASGISISTEIMGWFRQAPGKEREGVSFISGSDGSTYYADSVKGRFTISADNSKNTAYLQMNSLKPEDTAVYYCATSDFAWGQGTLVTVSS

SEQ ID NO: 87 - protein, 122 aa, synthetic construct
EVQLVESGGGLVQPGGSLRLSCAASGRTFSAHSVYTMGWFRQAPGKEREWVSAIFSDGDTYADSVKGRFTISADNSKNTAYLQMNSLKPEDTAVYYCAIDEGMDYDGNFYDWGQGTLVTVSS

SEQ ID NO: 88 - protein, 115 aa, synthetic construct
EVQLVESGGGLVQPGGSLRLSCAASGFTFDDYVMGWFRQAPGKEREFVVFIGSDHSTLYADSVKGRFTISADNSKNTAYLQMNSLKPEDTAVYYCGRLDGAIDYWGQGTLVTVSS

SEQ ID NO: 89 - protein, 119 aa, synthetic construct
EVQLVESGGGLVQPGGSLRLSCAASGGTLNNNPMAMGWFRQAPGKERELVSAIFSDGSTMYADSVKGRFTISADNSKNTAYLQMNSLKPEDTAVYYCAADSETSGNWVWGQGTLVTVSS

SEQ ID NO: 90 - protein, 119 aa, synthetic construct
EVQLVESGGGLVQPGGSLRLSCAASGSIFGLNAMGWFRQAPGKERELVSAIFSDGSTIYADSVKGRFTISADNSKNTAYLQMNSLKPEDTAVYYCAKDQGTSPYGMDVWGQGTLVTVSS

SEQ ID NO: 91 - protein, 112 aa, synthetic construct
EVQLVESGGGLVQPGGSLRLSCAASGRTFSDDAMGWFRQAPGKEREFVGEIILSKGFTYYADSVKGRFTISADNSKNTAYLQMNSLKPEDTAVYYCANQYGWGQGTLVTVSS

SEQ ID NO: 92 - protein, 111 aa, synthetic construct
EVQLVESGGGLVQPGGSLRLSCAASGRIFSTYFMGWFRQAPGKERELVSAIFSDGSTYYADSVKGRFTISADNSKNTAYLQMNSLKPEDTAVYYCANQYGWGQGTLVTVSS

SEQ ID NO: 93 - protein, 115 aa, synthetic construct
EVQLVESGGGLVQPGGSLRLSCAASGLTFSRYAMGWFRQAPGKERELVSAIFSDGSTYYADSVKGRFTISADNSKNTAYLQMNSLKPEDTAVYYCARGPNWFDPWGQGTLVTVSS

SEQ ID NO: 94 - protein, 116 aa, synthetic construct
EVQLVESGGGLVQPGGSLRLSCAASGFTFSTSWMGWFRQAPGKEREFVADIMPYGSTEYADSVKGRFTISADNSKNTAYLQMNSLKPEDTAVYYCAAFDGYTGSDWGQGTLVTVSS

SEQ ID NO: 95 - protein, 114 aa, synthetic construct
EVQLVESGGGLVQPGGSLRLSCAASGSTISDRAMGWFRQAPGKERELVSAIFSDGSTLYADSVKGRFTISADNSKNTAYLQMNSLKPEDTAVYYCASDVGMDVWGQGTLVTVSS

SEQ ID NO: 96 - protein, 118 aa, synthetic construct
EVQLVESGGGLVQPGGSLRLSCAASGGGTFGSFPMGWFRQAPGKERESVSIDIDGLTYYADSVKGRFTISADNSKNTAYLQMNSLKPEDTAVYYCAAGYDSLFAGYDWGQGTLVTVSS

SEQ ID NO: 97 - protein, 117 aa, synthetic construct
EVQLVESGGGLVQPGGSLRLSCAASGISISTEIMGWFRQAPGKEREFVGTMVWSSDTIYYADSVKGRFTISADNSKNTAYLQMNSLKPEDTAVYYCARDPGGYDYVWGQGTLVTVSS

SEQ ID NO: 98 - protein, 116 aa, synthetic construct
EVQLVESGGGLVQPGGSLRLSCAASGRIFSTYFMGWFRQAPGKERELVSAIFSDGSTYYADSVKGRFTISADNSKNTAYLQMNSLKPEDTAVYYCAAFDGYTGSDWGQGTLVTVSS

SEQ ID NO: 99 - protein, 111 aa, synthetic construct
EVQLVESGGGLVQPGGSLRLSCAASGRTFSSMGWFRQALGKEREFVAGISWTGGHTLYADSVKGRFTISADNSKNTAYLQMNSLKPEDTAVYYCAVPNGNWGQGTLVTVSS

SEQ ID NO: 100 - protein, 125 aa, synthetic construct
EVQLVESGGGLVQPGGSLRLSCAASGISISTEVMGWFRQAPGKEREFVAGISWSGGSTDYADSVKGRFTISADNSKNTAYLQMNSLKPEDTAVYYCTTDPSLLWFGELQLPLDYWGQGTLVTVSS

SEQ ID NO: 101 - protein, 114 aa, synthetic construct
EVQLVESGGGLVQPGGSLRLSCAASGGTISTYAMGWFRQAPGKEREWVSAIFSDGTKYYADSVKGRFTISADNSKNTAYLQMNSLKPEDTAVYYCTTGRDFDYWGQGTLVTVSS

SEQ ID NO: 102 - protein, 120 aa, synthetic construct
EVQLVESGGGLVQPGGSLRLSCAASGRTFSNYAIVMGWFRQAPGKEREGVAAIYTGDGTTYYADSVKGRFTISADNSKNTAYLQMNSLKPEDTAVYYCAADSETSGNWVWGQGTLVTVSS

SEQ ID NO: 103 - protein, 117 aa, synthetic construct
EVQLVESGGGLVQPGGSLRLSCAASGFTFDYYAMGWFRQAPGKEREGVAAIFSDGSTYYADSVKGRFTISADNSKNTAYLQMNSLKPEDTAVYYCAANVGVTGSYEWGQGTLVTVSS

SEQ ID NO: 104 - protein, 118 aa, synthetic construct
EVQLVESGGGLVQPGGSLRLSCAASGFTLDDYVMGWFRQAPGKEREGVSFISGSDGSTYYADSVKGRFTISADNSKNTAYLQMNSLKPEDTAVYYCAADGPGGRSYEWGQGTLVTVSS

SEQ ID NO: 105 - protein, 118 aa, synthetic construct
EVQLVESGGGLVQPGGSLRLSCAASGGRALSNYAMGWFRQAPGKERELVAATGRRGGPTYYADSVKGRFTISADNSKNTAYLQMNSLKPEDTAVYYCAVISGLVQRDWGQGTLVTVSS

SEQ ID NO: 106 - protein, 115 aa, synthetic construct
EVQLVESGGGLVQPGGSLRLSCAASGRIFSTYFMGWFRQAPGKERELVSAIFSDGSTYYADSVKGRFTISADNSKNTAYLQMNSLKPEDTAVYYCTRDSTDTRYWGQGTLVTVSS

SEQ ID NO: 107 - protein, 114 aa, synthetic construct
EVQLVESGGGLVQPGGSLRLSCAASGFIFSSYWMGWFRQAPGKERELVSAIFSDGSTYYADSVKGRFTISADNSKNTAYLQMNSLKPEDTAVYYCALDLSTVRWGQGTLVTVSS

SEQ ID NO: 108 - protein, 112 aa, synthetic construct
EVQLVESGGGLVQPGGSLRLSCAASGFTFSRSMGWFRQAPGKEREFVAGISWTGGHTLYADSVKGRFTISADNSKNTAYLQMNSLKPEDTAVYYCAVPNGNWGQGTLVTVSS

SEQ ID NO: 109 - protein, 118 aa, synthetic construct
EVQLVESGGGLVQPGGSLRLSCAASGGTLDDYVMGWFRQAPGKEREFVAAITSDHITWYADSVKGRFTISADNSKNTAYLQMNSLKPEDTAVYYCTRDGPGWELFGNWGQGTLVTVSS

SEQ ID NO: 110 - protein, 117 aa, synthetic construct
EVQLVESGGGLVQPGGSLRLSCAASGRTSTVNGMGWFRQAPGKEREFVALISWSGGSTYYADSVKGRFTISADNSKNTAYLQMNSLKPEDTAVYYCAADVWGLGYDWGQGTLVTVSS

SEQ ID NO: 111 - protein, 121 aa, synthetic construct
EVQLVESGGGLVQPGGSLRLSCAASGSISSINVMGWFRQAPGKERELVASIFTDDGDSYYADSVKGRFTISADNSKNTAYLQMNSLKPEDTAVYYCAREGPDGSYGLFDYWGQGTLVTVSS

SEQ ID NO: 112 - protein, 126 aa, synthetic construct
EVQLVESGGGLVQPGGSLRLSCAASGTSITTYRYYMGWFRQAPGKERELVALIHTGGGTYYADSVKGRFTISADNSKNTAYLQMNSLKPEDTAVYYCAAGASFGSIFWESAREYNWGQGTLVTVSS

SEQ ID NO: 113 - protein, 112 aa, synthetic construct
EVQLVESGGGLVQPGGSLRLSCAASGSIFGFDSMGWFRQAPGKEREFVGEIILSKGFTYYADSVKGRFTISADNSKNTAYLQMNSLKPEDTAVYYCANQYGWGQGTLVTVSS

SEQ ID NO: 114 - protein, 115 aa, synthetic construct
EVQLVESGGGLVQPGGSLRLSCAASGLRFSDYVMGWFRQAPGKEREGVSFISGSDGSTYYADSVKGRFTISADNSKNTAYLQMNSLKPEDTAVYYCATVGIPLNWGQGTLVTVSS

SEQ ID NO: 115 - protein, 121 aa, synthetic construct
EVQLVESGGGLVQPGGSLRLSCAASGSDINFNVMGWFRQAPGKERELVALIFSGGSADYADSVKGRFTISADNSKNTAYLQMNSLKPEDTAVYYCARDATIFGVVTPFDYWGQGTLVTVSS

SEQ ID NO: 116 - protein, 112 aa, synthetic construct
EVQLVESGGGLVQPGGSLRLSCAASGVTFNNYGMGWFRQAPGKEREFVAGIESGGYTYYADSVKGRFTISADNSKNTAYLQMNSLKPEDTAVYYCAAPTGNWGQGTLVTVSS

SEQ ID NO: 117 - protein, 112 aa, synthetic construct
EVQLVESGGGLVQPGGSLRLSCAASDRTFSGWFRQAPGKEREFVAAISMSGDDTIYADSVKGRFTISADNSKNTAYLQMNSLKPEDTAVYYCARGGGPIDYWGQGTLVTVSS

SEQ ID NO: 118 - protein, 117 aa, synthetic construct
EVQLVESGGGLVQPGGSLRLSCAASGFSLDYYGMGWFRQAPGKEREMVSAIFSDGSTYYADSVKGRFTISADNSKNTAYLQMNSLKPEDTAVYYCASASQVGSGYDWGQGTLVTVSS

SEQ ID NO: 119 - protein, 116 aa, synthetic construct
EVQLLESGGGLVQPGGSLRLSCAASGFTFRRYVMGWVRQAPGKGLEWVSSISSTGFKTYYADSVKGRFTISRDNSKNTLYLQMNSLRAEDTAVYYCAKSLGRLDYWGQGTLVTVSS

SEQ ID NO: 120 - protein, 113 aa, synthetic construct
QVQLVQSGAEVKKPGSSVKVSCKASGGTFSTYAISWVRQAPGQGLEWMGGIISINYAQKFQGRVTITADESTSTAYMELSSLRSEDTAVYYCAWGAKYALDSWGQGTLVTVSS

SEQ ID NO: 121 - protein, 113 aa, synthetic construct
QVQLVQSGAEVKKPGSSVKVSCKASGGSFSSYAISWVRQAPGQGLEWMGGIIPMNYAQKFQGRVTITADESTSTAYMELSSLRSEDTAVYYCARQLAAALVYWGQGTLVTVSS

SEQ ID NO: 122 - protein, 115 aa, synthetic construct
QVQLVQSGAEVKKPGSSVKVSCKASGGTFSSFGISWVRQAPGQGLEWMGGIIPFNYAQKFQGRVTITADESTSTAYMELSSLRSEDTAVYYCAREGSYHYGLDVWGQGTLVTVSS

SEQ ID NO: 123 - protein, 124 aa, synthetic construct
EVQLLESGGGLVQPGGSLRLSCAASGFTFNKYPMMWVRQAPGKGLEWVSAITGSGGSTYYADSVKGRFTISRDNSKNTLYLQMNSLRAEDTAVYYCAKQIPGRKWTANGRKDYWGQGTLVTVSS

SEQ ID NO: 124 - protein, 117 aa, synthetic construct
EVQLLESGGGLVQPGGSLRLSCAASGFTFDRYRMMWVRQAPGKGLEWVSAITGSGGSTYYADSVKGRFTISRDNSKNTLYLQMNSLRAEDTAVYYCAKYFHGKFDYWGQGTLVTVSS

SEQ ID NO: 125 - protein, 115 aa, synthetic construct
EVQLLESGGGLVQPGGSLRLSCAASGFTFDRYRMMWVRQAPGKGLEWVSAISGRGDNTYYADSVKGRFTISRDNSKNTLYLQMNSLRAEDTAVYYCARGRLFDYWGQGTLVTVSS

SEQ ID NO: 126 - protein, 118 aa, synthetic construct
EVQLLESGGGLVQPGGSLRLSCAASGFTFEDYQMGWVRQAPGKGLEWVSTIDDLGRHTYYADSVKGRFTISRDNSKNTLYLQMNSLRAEDTAVYYCATAEDLPGYDYWGQGTLVTVSS

SEQ ID NO: 127 - protein, 118 aa, synthetic construct
EVQLLESGGGLVQPGGSLRLSCAASGFTFNKYPMMWVRQAPGKGLEWVSYISPIGPRTYYADSVKGRFTISRDNSKNTLYLQMNSLRAEDTAVYYCARVRRGGATDYWGQGTLVTVSS

SEQ ID NO: 128 - protein, 115 aa, synthetic construct
EVQLLESGGGLVQPGGSLRLSCAASGFTFDRYRMMWVRQAPGKGLEWVSAISGSGDKTYYADSVKGRFTISRDNSKNTLYLQMNSLRAEDTAVYYCARGRLFDYWGQGTLVTVSS

SEQ ID NO: 129 - protein, 116 aa, synthetic construct
EVQLLESGGGLVQPGGSLRLSCAASGFTFGNYRMTWVRQAPGKGLEWVSAISGSGGNTYYADSVKGRFTISRDNSKNTLYLQMNSLRAEDTAVYYCAKGWRRFDYWGQGTLVTVSS

SEQ ID NO: 130 - protein, 115 aa, synthetic construct
EVQLLESGGGLVQPGGSLRLSCAASGFTFRRYVMGWVRQAPGKGLEWVSSISSTGFKTYYADSVKGRFTISRDNSKNTLYLQMNSLRAEDTAVYYCARGRLFDYWGQGTLVTVSS

SEQ ID NO: 131 - protein, 116 aa, synthetic construct
EVQLLESGGGLVQPGGSLRLSCAASGFTFGAYPMYWVRQAPGKGLEWVSRISVAGRRTAYADSVKGRFTISRDNSKNTLYLQMNSLRAEDTAVYYCAKRGKQFDYWGQGTLVTVSS

SEQ ID NO: 132 - protein, 117 aa, synthetic construct
EVQLLESGGGLVQPGGSLRLSCAASGFTFSRYGMHWVRQAPGKGLEWVSAITGSGGSTYYADSVKGRFTISRDNSKNTLYLQMNSLRAEDTAVYYCARSYGGGFDYWGQGTLVTVSS

SEQ ID NO: 133 - protein, 119 aa, synthetic construct
EVQLLESGGGLVQPGGSLRLSCAASGFTFGNYAMAWVRQAPGKGLEWVSRISVAGRRTAYADSVKGRFTISRDNSKNTLYLQMNSLRAEDTAVYYCARPPKRGPRFDYWGQGTLVTVSS

SEQ ID NO: 134 - protein, 115 aa, synthetic construct
EVQLLESGGGLVQPGGSLRLSCAASGFTFGNYRMTWVRQAPGKGLEWVSSISGSSGTTYYADSVKGRFTISRDNSKNTLYLQMNSLRAEDTAVYYCARGRLFDYWGQGTLVTVSS

SEQ ID NO: 135 - protein, 116 aa, synthetic construct
EVQLLESGGGLVQPGGSLRLSCAASGFTFDRYRMMWVRQAPGKGLEWVSAISGRGDNTYYADSVKGRFTISRDNSKNTLYLQMNSLRAEDTAVYYCAKGWRRFDYWGQGTLVTVSS

SEQ ID NO: 136 - protein, 120 aa, synthetic construct
EVQLLESGGGLVQPGGSLRLSCAASGFTFDRYRMMWVRQAPGKGLEWVSAISREGRATYYADSVKGRFTISRDNSKNTLYLQMNSLRAEDTAVYYCGRVPYRSTWYPLYWGQGTLVTVSS

SEQ ID NO: 137 - protein, 117 aa, synthetic construct
EVQLLESGGGLVQPGGSLRLSCAASGFTFGDHSMGWVRQAPGKGLEWVSRISVAGRRTAYADSVKGRFTISRDNSKNTLYLQMNSLRAEDTAVYYCAKGVRKGFDYWGQGTLVTVSS

SEQ ID NO: 138 - protein, 119 aa, synthetic construct
EVQLLESGGGLVQPGGSLRLSCAASGFTFNKYPMMWVRQAPGKGLEWVSRISVAGRRTAYADSVKGRFTISRDNSKNTLYLQMNSLRAEDTAVYYCARDRGGATTLDYWGQGTLVTVSS

SEQ ID NO: 139 - protein, 116 aa, synthetic construct
EVQLLESGGGLVQPGGSLRLSCAASGFTFGQESMYWVRQAPGKGLEWVSRISVAGRRTAYADSVKGRFTISRDNSKNTLYLQMNSLRAEDTAVYYCAKRGKQFDYWGQGTLVTVSS

SEQ ID NO: 140 - protein, 120 aa, synthetic construct; identical to SEQ ID NO: 136

SEQ ID NO: 141 - protein, 116 aa, synthetic construct
EVQLLESGGGLVQPGGSLRLSCAASGFTFGNYRMTWVRQAPGKGLEWVSAISGNGGSTFYADSVKGRFTISRDNSKNTLYLQMNSLRAEDTAVYYCAKGARRFDYWGQGTLVTVSS

SEQ ID NO: 142 - protein, 115 aa, synthetic construct; identical to SEQ ID NO: 128

SEQ ID NO: 143 - protein, 116 aa, synthetic construct; identical to SEQ ID NO: 139

SEQ ID NO: 144 - protein, 115 aa, synthetic construct
EVQLLESGGGLVQPGGSLRLSCAASGFTFSPRRMSWVRQAPGKGLEWVSAISGNGGSTFYADSVKGRFTISRDNSKNTLYLQMNSLRAEDTAVYYCARGNYFDYWGQGTLVTVSS

SEQ ID NO: 145 - protein, 116 aa, synthetic construct
EVQLLESGGGLVQPGGSLRLSCAASGFTFGAYPMYWVRQAPGKGLEWVSRISVAGRRTAYADSVKGRFTISRDNSKNTLYLQMNSLRAEDTAVYYCAKSGRRFDYWGQGTLVTVSS

SEQ ID NO: 146 - protein, 116 aa, synthetic construct; identical to SEQ ID NO: 139

SEQ ID NO: 147 - protein, 121 aa, synthetic construct
EVQLLESGGGLVQPGGSLRLSCAASGFTFHKYGMAWVRQAPGKGLEWVSIRGSSSSTYYADSVKGRFTISRDNSKNTLYLQMNSLRAEDTAVYYCAKIRWNTAQVPVFDYWGQGTLVTVSS

SEQ ID NO: 148 - protein, 116 aa, synthetic construct; identical to SEQ ID NO: 131

SEQ ID NO: 149 - protein, 117 aa, synthetic construct
EVQLLESGGGLVQPGGSLRLSCAASGFTFSRYFMGWVRQAPGKGLEWVSSISGSSGTTYYADSVKGRFTISRDNSKNTLYLQMNSLRAEDTAVYYCARAGRILFDYWGQGTLVTVSS

SEQ ID NO: 150 - protein, 116 aa, synthetic construct
EVQLLESGGGLVQPGGSLRLSCAASGFTFSRYAMNWVRQVPGKGLEWVSYISPIGPRTYYADSVKGRFTISRDNSKNTLYLQMNSLRAEDTAVYYCAKGLRRFDYWGQGTLVTVSS

SEQ ID NO: 151 - protein, 119 aa, synthetic construct
EVQLLESGGGLVQPGGSLRLSCAASGFTFNKYPMMWVRQAPGKGLEWVSRISVAGRRTAYADSVKGRFTISRDNSKNTLYLQMNSLRAEDTAVYYCAGLPKRGPRFDYWGQGTLVTVSS

SEQ ID NO: 152 - protein, 124 aa, synthetic construct
EVQLLESGGGLVQPGGSLRLSCAASGFTFHKYGMAWVRQAPGKGLEWVSRISVAGRRTAYADSVKGRFTISRDNSKNTLYLQMNSLRAEDTAVYYCAKQIPGRKWTANGRKDYWGQGTLVTVSS

SEQ ID NO: 153 - protein, 118 aa, synthetic construct
EVQLLESGGGLVQPGGSLRLSCAASGFTFPKYDMMWVRQAPGKGLEWVSRISVAGRRTAYADSVKGRFTISRDNSKNTLYLQMNSLRAEDTAVYYCATAEDLPGYDYWGQGTLVTVSS

SEQ ID NO: 154 - protein, 116 aa, synthetic construct
EVQLLESGGGLVQPGGSLRLSCAASGFTFSDYPMYWVRQAPGKGLEWVSRISVAGRRTAYADSVKGRFTISRDNSKNTLYLQMNSLRAEDTAVYYCAKRSKAFDYWGQGTLVTVSS

SEQ ID NO: 155 - protein, 120 aa, synthetic construct; identical to SEQ ID NO: 136

SEQ ID NO: 156 - protein, 117 aa, synthetic construct
EVQLLESGGGLVQPGGSLRLSCAASGFTFGNYAMAWVRQAPGKGLEWVSRISVAGRRTAYADSVKGRFTISRDNSKNTLYLQMNSLRAEDTAVYYCAKWATRGFDYWGQGTLVTVSS

SEQ ID NO: 157 - protein, 116 aa, synthetic construct
EVQLLESGGGLVQPGGSLRLSCAASGFTFGAYPMYWVRQAPGKGLEWVSRISVAGRRTAYADSVKGRFTISRDNSKNTLYLQMNSLRAEDTAVYYCAKRSRLFDYWGQGTLVTVSS

SEQ ID NO: 158 - protein, 116 aa, synthetic construct; identical to SEQ ID NO: 139

SEQ ID NO: 159 - protein, 117 aa, synthetic construct
EVQLLESGGGLVQPGGSLRLSCAASGFTFRRYVMGWVRQAPGKGLEWVSSIGANGAPTYYADSVKGRFTISRDNSKNTLYLQMNSLRAEDTAVYYCAKRTRSKFDYWGQGTLVTVSS

SEQ ID NO: 160 - protein, 116 aa, synthetic construct
EVQLLESGGGLVQPGGSLRLSCAASGFTFGAYPMYWVRQAPGKGLEWVSRISVAGRRTAYADSVKGRFTISRDNSKNTLYLQMNSLRAEDTAVYYCAKHGTGFDYWGQGTLVTVSS

SEQ ID NO: 161 - protein, 119 aa, synthetic construct
EVQLLESGGGLVQPGGSLRLSCAASGFTFRRYVMGWVRQAPGKGLEWVSRISVAGRRTAYADSVKGRFTISRDNSKNTLYLQMNSLRAEDTAVYYCARPPKRGPRFDYWGQGTLVTVSS

SEQ ID NO: 162 - protein, 116 aa, synthetic construct
EVQLLESGGGLVQPGGSLRLSCAASGFTFNKYPMMWVRQAPGKGLEWVSRISVAGRRTAYADSVKGRFTISRDNSKNTLYLQMNSLRAEDTAVYYCAKAYTGRSYWGQGTLVTVSS

SEQ ID NO: 163 - protein, 116 aa, synthetic construct
EVQLLESGGGLVQPGGSLRLSCAASGFTFDRYRMMWVRQAPGKGLEWVSSIGANGAPTYYADSVKGRFTISRDNSKNTLYLQMNSLRAEDTAVYYCAKSGRRFDYWGQGTLVTVSS

SEQ ID NO: 164 - protein, 117 aa, synthetic construct
EVQLLESGGGLVQPGGSLRLSCAASGFTFHKYGMAWVRQAPGKGLEWVSAISREGRATYYADSVKGRFTISRDNSKNTLYLQMNSLRAEDTAVYYCAKRTRSKFDYWGQGTLVTVSS

SEQ ID NO: 165 - protein, 119 aa, synthetic construct
EVQLLESGGGLVQPGGSLRLSCAASGFTFNHYDMGWVRQAPGKGLEWVSRISVAGRRTSYADSVKGRFTISRDNSKNTLYLQMNSLRAEDTAVYYCAKRANSRRGFDYWGQGTLVTVSS

SEQ ID NO: 166 - protein, 115 aa, synthetic construct
EVQLLESGGGLVQPGGSLRLSCAASGFTFSPRRMSWVRQAPGKGLEWVSAISGNGGSTFYADSVKGRFTISRDNSKNTLYLQMNSLRAEDTAVYYCARGRLFDYWGQGTLVTVSS

SEQ ID NO: 167 - protein, 116 aa, synthetic construct
EVQLLESGGGLVQPGGSLRLSCAASGFTFAHEPMVWVRQAPGKGLEWVSRISVAGRRTAYADSVKGRFTISRDNSKNTLYLQMNSLRAEDTAVYYCAKSIKPFDYWGQGTLVTVSS

SEQ ID NO: 168 - protein, 116 aa, synthetic construct; identical to SEQ ID NO: 139

SEQ ID NO: 169 - protein, 116 aa, synthetic construct
EVQLLESGGGLVQPGGSLRLSCAASGFTFGSSAMSWVRQAPGKGLEWVSEIRVGGGDTYYADSVKGRFTISRDNSKNTLYLQMNSLRAEDTAVYYCAKGLRRFDYWGQGTLVTVSS

SEQ ID NO: 170 - protein, 116 aa, synthetic construct
EVQLLESGGGLVQPGGSLRLSCAASGFTFNKYPMMWVRQAPGKGLEWVSRISVAGRRTAYADSVKGRFTISRDNSKNTLYLQMNSLRAEDTAVYYCAKAGSGFDYWGQGTLVTVSS

SEQ ID NO: 171 - protein, 115 aa, synthetic construct
EVQLLESGGGLVQPGGSLRLSCAASGFTFNKYPMMWVRQAPGKGLEWVSRISVAGRRTAYADSVKGRFTISRDNSKNTLYLQMNSLRAEDTAVYYCARGRLFDYWGQGTLVTVSS

SEQ ID NO: 172 - protein, 116 aa, synthetic construct; identical to SEQ ID NO: 131

SEQ ID NO: 173 - protein, 117 aa, synthetic construct
EVQLLESGGGLVQPGGSLRLSCAASGFTFNHYGMGWVRQAPGKGLEWVSQISETGRRTYYADSVKGRFTISRDNSKNTLYLQMNSLRAEDTAVYYCARVWRNHLDYWGQGTLVTVSS

SEQ ID NO: 174 - protein, 116 aa, synthetic construct
EVQLLESGGGLVQPGGSLRLSCAASGFTFSNYGVSWVRQAPGKGLEWVSTISHGGEHTYYADSVKGRFTISRDNSKNTLYLQMNSLRAEDTAVYYCAKGARRFDYWGQGTLVTVSS

SEQ ID NO: 175 - protein, 115 aa, synthetic construct; identical to SEQ ID NO: 125

SEQ ID NO: 176 - protein, 120 aa, synthetic construct
EVQLLESGGGLVQPGGSLRLSCAASGFTFDRYRMMWVRQAPGKGLEWVSWISPHGALTYYADSVKGRFTISRDNSKNTLYLQMNSLRAEDTAVYYCARGPYGRYAALDYWGQGTLVTVSS

SEQ ID NO: 177 - protein, 115 aa, synthetic construct
EVQLLESGGGLVQPGGSLRLSCAASGFTFRRYVMGWVRQAPGKGLEWVSSISGYGSTTYYADSVKGRFTISRDNSKNTLYLQMNSLRAEDTAVYYCARGRLFDYWGQGTLVTVSS

SEQ ID NO: 178 - protein, 119 aa, synthetic construct
EVQLLESGGGLVQPGGSLRLSCAASGFTFGNYRMTWVRQAPGKGLEWVSEISPSGKKKYYADSVKGRFTISRDNSKNTLYLQMNSLRAEDTAVYYCAKSPYNWNPFDYWGQGTLVTVSS

SEQ ID NO: 179 - protein, 124 aa, synthetic construct
EVQLLESGGGLVQPGGSLRLSCAASGFTFAKYPMMWVRQAPGKGLEWVSAITGSGGSTYYADSVKGRFTISRDNSKNTLYLQMNSLRAEDTAVYYCAKQIPGRKWTANGRKDYWGQGTLVTVSS

SEQ ID NO: 180 - protein, 115 aa, synthetic construct
EVQLLESGGGLVQPGGSLRLSCAASGFTFGNYRMTWVRQAPGKGLEWVSAITGSGGSTYYADSVKGRFTISRDNSKNTLYLQMNSLRAEDTAVYYCARGRLFDYWGQGTLVTVSS

SEQ ID NO: 181 - protein, 118 aa, synthetic construct
EVQLLESGGGLVQPGGSLRLSCAASGFTFGNYRMTWVRQAPGKGLEWVSAISREGRATYYADSVKGRFTISRDNSKNTLYLQMNSLRAEDTAVYYCAREWQHGPLAYWGQGTLVTVSS

SEQ ID NO: 182 - protein, 115 aa, synthetic construct
EVQLLESGGGLVQPGGSLRLSCAASGFTFDRYRMTWVRQAPGKGLEWVSAISGRGDNTYYADSVKGRFTISRDNSKNTLYLQMNSLRAEDTAVYYCARGRLFDYWGQGTLVTVSS

SEQ ID NO: 183 - protein, 126 aa, synthetic construct
EVQLLESGGGLVQPGGSLRLSCAASGFTFAKYKMWWVRQAPGKGLEWVSAISREGRATYYADSVKGRFTISRDNSKNTLYLQMNSLRAEDTAVYYCARQRSYSRYDIRTPQTYDYWGQGTLVTVSS

SEQ ID NO: 184 - protein, 116 aa, synthetic construct; identical to SEQ ID NO: 139

SEQ ID NO: 185 - protein, 116 aa, synthetic construct
EVQLLESGGGLVQPGGSLRLSCAASGFTFDRYRMMWVRQAPGKGLEWVSDIGASGSATSYADSVKGRFTISRDNSKNTLYLQMNSLRAEDTAVYYCAKPGHRFDYWGQGTLVTVSS

SEQ ID NO: 186 - protein, 118 aa, synthetic construct
EVQLLESGGGLVQPGGSLRLSCAASGFTFGAYPMYWVRQAPGKGLEWVSRISVAGRRTAYADSVKGRFTISRDNSKNTLYLQMNSLRAEDTAVYYCAKSRTGRYFDYWGQGTLVTVSS

SEQ ID NO: 187 - protein, 115 aa, synthetic construct
EVQLLESGGGLVQPGGSLRLSCAASGFTFDRYRMMWVRQAPGKGLEWVSAISGNGGSTFYADSVKGRFTISRDNSKNTLYLQMNSLRAEDTAVYYCARGRLFDYWGQGTLVTVSS

SEQ ID NO: 188 - protein, 116 aa, synthetic construct
EVQLLESGGGLVQPGGSLRLSCAASGFTFNKYPMMWVRQAPGKGLEWVSRISVAGRRTAYADSVKGRFTISRDNSKNTLYLQMNSLRAEDTAVYYCAKSIKPFDYWGQGTLVTVSS

SEQ ID NO: 189 - protein, 119 aa, synthetic construct
EVQLLESGGGLVQPGGSLRLSCTASGFTFSYYRMYWVRQAPGKGLEWVSAISREGRATYYADSVKGRFTISRDNSKNTLYLQMNSLRAEDTAVYYCAKRANSRRGFDYWGQGTLVTVSS

SEQ ID NO: 190 - protein, 116 aa, synthetic construct; identical to SEQ ID NO: 139

SEQ ID NO: 191 - protein, 117 aa, synthetic construct
EVQLLESGGGLVQPGGSLRLSCAASGFTFGNYAMAWVRQAPGKGLEWVSRISVAGRRTAYADSVKGRFTISRDNSKNTLYLQMNSLRAEDTAVYYCARGYRGYFDYWGQGTLVTVSS

SEQ ID NO: 192 - protein, 115 aa, synthetic construct
EVQLLESGGGLVQPGGSLRLSCAASGFTFSKYQMTWVRQAPGKGLEWVSAISGSGGNTYYADSVKGRFTISRDNSKNTLYLQMNSLRAEDTAVYYCARGRLFDYWGQGTLVTVSS

SEQ ID NO: 193 - protein, 122 aa, synthetic construct
EVQLLESGGGLVQPGGSLRLSCAASGFTFEQTDMHWVRQAPGKGLEWVSRISVAGRRTAYADSVKGRFTISRDNSKNTLYLQMNSLRAEDTAVYYCAKDKRYRGSQHYFDYWGQGTLVTVSS

SEQ ID NO: 194 - protein, 119 aa, synthetic construct
EVQLLESGGGLVQPGGSLRLSCAASGFTFADEGMMWVRQAPGKGLEWVSRISVAGRRTTYADSVKGRFTISRDNSKNTLYLQMNSLRAEDTAVYYCAKFPSTHGKFDYWGQGTLVTVSS

SEQ ID NO: 195 - protein, 117 aa, synthetic construct
EVQLLESGGGLVQPGGSLRLSCAASGFTFGAYPMYWVRQAPGKGLEWVSRISVAGRRTAYADSVKGRFTISRDNSKNTLYLQMNSLRAEDTAVYYCAKYFHGKFDYWGQGTLVTVSS

SEQ ID NO: 196 - protein, 115 aa, synthetic construct
EVQLLESGGGLVQPGGSLRLSCAASGFTFDRYRMMWVRQAPGKGLEWVSAITGSGGSTYYADSVKGRFTISRDNSKNTLYLQMNSLRAEDTAVYYCARGRLFDYWGQGTLVTVSS

SEQ ID NO: 197 - protein, 116 aa, synthetic construct
EVQLLESGGGLVQPGGSLRLSCAASGFTFSRYFMGWVRQAPGKGLEWVSSISGSSGTTYYADSVKGRFTISRDNSKNTLYLQMNSLRAEDTAVYYCAKAGRKFDYWGQGTLVTVSS

SEQ ID NO: 198 - protein, 116 aa, synthetic construct
EVQLLESGGGLVQPGGSLRLSCAASGFTFSKYQMTWVRQAPGKGLEWVSAISGNGGSTFYADSVKGRFTISRDNSKNTLYLQMNSLRAEDTAVYYCAKGRRRFDYWGQGTLVTVSS

SEQ ID NO: 199 - protein, 117 aa, synthetic construct
EVQLLESGGGLVQPGGSLRLSCAASGFTFSRYGMHWVRQAPGKGLEWVSVISGSGGRPNYADSVKGRFTISRDNSKNTLYLQMNSLRAEDTAVYYCARGYRGYFDYWGQGTLVTVSS

SEQ ID NO: 200 - protein, 116 aa, synthetic construct; identical to SEQ ID NO: 157

SEQ ID NO: 201 - protein, 116 aa, synthetic construct
EVQLLESGGGLVQPGGSLRLSCAASGFTFDRYRMMWVRQAPGKGLEWVSAISGSGDKTYYADSVKGRFTISRDNSKNTLYLQMNSLRAEDTAVYYCAKSGRRFDYWGQGTLVTVSS

SEQ ID NO: 202 - protein, 116 aa, synthetic construct
EVQLLESGGGLVQPGGSLRLSCAASGFTFSRYRMTWVRQAPGKGLEWVSAISGRGDNTYYADSVKGRFTISRDNSKNTLYLQMNSLRAEDTAVYYCAKSGRRFDYWGQGTLVTVSS

SEQ ID NO: 203 - protein, 117 aa, synthetic construct
EVQLLESGGGLVQPGGSLRLSCAASGFTFGNYAMAWVRQAPGKGLEWVSRISVAGRRTAYADSVKGRFTISRDNSKNTLYLQMNSLRAEDTAVYYCARVWRNHLDYWGQGTLVTVSS

SEQ ID NO: 204 - protein, 116 aa, synthetic construct
EVQLLESGGGLVQPGGSLRLSCAASGFTFNKYPMMWVRQAPGKGLEWVSRISVAGRRTAYADSVKGRFTISRDNSKNTLYLQMNSLRAEDTAVYYCAKRGKQFDYWGQGTLVTVSS

SEQ ID NO: 205 - protein, 116 aa, synthetic construct
EVQLLESGGGLVQPGGSLRLSCAASGLTFPNYGMGWVRQAPGKGLEWVGKINYAGNTDYNDSVKGRFTISRDNSKNTLYLQMNSLRAEDTAVYYCAKRTRSKFDYWGQGTLVTVSS

SEQ ID NO: 206 - protein, 116 aa, synthetic construct
EVQLLESGGGLVQPGGSLRLSCAASGFTFDRYRMMWVRQAPGKGLEWVSRISVAGRRTAYADSVKGRFTISRDNSKNTLYLQMNSLRAEDTAVYYCAKPGRLFDYWGQGTLVTVSS

SEQ ID NO: 207 - protein, 126 aa, synthetic construct
EVQLLESGGGLVQPGGSLRLSCAASGFTFGNYRMTWVRQAPGKGLEWVSAISREGRATYYADSVKGRFTISRDNSKNTLYLQMNSLRAEDTAVYYCARQRSYSRYDIRTPQTYDYWGQGTLVTVSS

SEQ ID NO: 208 - protein, 116 aa, synthetic construct; identical to SEQ ID NO: 170

SEQ ID NO: 209 - protein, 115 aa, synthetic construct; identical to SEQ ID NO: 128

SEQ ID NO: 210 - protein, 115 aa, synthetic construct; identical to SEQ ID NO: 187

SEQ ID NO: 211 - protein, 119 aa, synthetic construct
EVQLLESGGGLVQPGGSLRLSCAASGFTFNHYGMGWVRQAPGKGLEWVSAISREGRATYYADSVKGRFTISRDNSKNTLYLQMNSLRAEDTAVYYCAKRANSRRGFDYWGQGTLVTVSS

SEQ ID NO: 212 - protein, 117 aa, synthetic construct
EVQLLESGGGLVQPGGSLRLSCAASGLTFPNYGMGWVRQAPGKGLEWVSEISPSGKKKYYADSVKGRFTISRDNSKNTLYLQMNSLRAEDTAVYYCAKRTRSKFDYWGQGTLVTVSS

SEQ ID NO: 213 - protein, 115 aa, synthetic construct
EVQLLESGGGLVQPGGSLRLSCAASGFTFAKYKMWWVRQAPGKGLEWVSAISGNGGSTFYADSVKGRFTISRDNSKNTLYLQMNSLRAEDTAVYYCARGRLFDYWGQGTLVTVSS

SEQ ID NO: 214 - protein, 115 aa, synthetic construct; identical to SEQ ID NO: 196

SEQ ID NO: 215 - protein, 118 aa, synthetic construct
EVQLLESGGGLVQPGGSLRLSCAASGFTFSRYTMNWVRQAPGKGLEWVSAISGSGARTYYADSVKGRFTISRDNSKNTLYLQMNSLRAEDTAVYYCARGWSSHWFDPWGQGTLVTVSS

SEQ ID NO: 216 - protein, 119 aa, synthetic construct
EVQLLESGGGLVQPGGSLRLSCAASGFTFGRYAMSWVRQAPGKGLEWVSSVSGSGGSTYYADSVKGRFTISRDNSKNTLYLQMNSLRAEDTAVYYCARSRGRGAWFDHWGQGTLVTVSS

SEQ ID NO: 217 - protein, 122 aa, synthetic construct
EVQLLESGGGLVQPGGSLRLSCAASGFTFSNYAMAWVRQAPGKGLEWVSAISGSAGRTYYADSVKGRFTISRDNSKNTLYLQMNSLRAEDTAVYYCARRARRSGWYGALDYWGQGTLVTVSS

SEQ ID NO: 218 - protein, 120 aa, synthetic construct
EVQLLESGGGLVQPGGSLRLSCAASGFSFSSYAMNWVRQAPGKGLEWVSAISGSGGKTYYADSVKGRFTISRDNSKNTLYLQMNSLRAEDTAVYYCARWGGYAKRAFDFWGQGTLVTVSS

SEQ ID NO: 219 - protein, 120 aa, synthetic construct
EVQLLESGGGLVQPGGSLRLSCAASGLTFNNYAMSWVRQAPGKGLEWVSLISGSGGRTYYADSVKGRFTISRDNSKNTLYLQMNSLRAEDTAVYYCAKLMYRAYGPADYWGQGTLVTVSS

SEQ ID NO: 220 - protein, 118 aa, synthetic construct
EVQLLESGGGLVQPGGSLRLSCAASGFTFNRYAMSWVRQAPGKGLEWVSSISVSGGTTYYADSVKGRFTISRDNSKNTLYLQMNSLRAEDTAVYYCARGGRWRGFGNWGQGTLVTVSS

SEQ ID NO: 221 - protein, 119 aa, synthetic construct
EVQLLESGGGLVQPGGSLRLSCAASGFTFSTYTMTWVRQAPGKGLEWVSSISGGGGRTYYAESVKGRFTISRDNSKNTLYLQMNSLRAEDTAVYYCARYRLRPRDWDSWGQGTLVTVSS

SEQ ID NO: 222 - protein, 120 aa, synthetic construct
EVQLLESGGGLVQPGGSLRLSCAASGFTFSRYGMSWVRQAPGKGLEWVSAISGSGRSTYYADSVKGRFTISRDNSKNTLYLQMNSLRAEDTAVYYCARGRTGGSYYFDYWGQGTLVTVSS

SEQ ID NO: 223 - protein, 116 aa, synthetic construct
EVQLLESGGGLVQPGGSLRLSCAASGFTFSKYAMGWVRQAPGKGLEWVSAISGSGGRTHYADSVKGRFTISRDNSKNTLYLQMNSLRAEDTAVYYCARGARALPYWGQGTLVTVSS

SEQ ID NO: 224 - protein, 117 aa, synthetic construct
EVQLLESGGGLVQPGGSLRLSCAASGFTFRRSAMSWVRQAPGKGLEWVSGISGSGGSTYYADSVKGRFTISRDNSKNTLYLQMNSLRAEDTAVYYCARKRGRAFDIWGQGTLVTVSS

SEQ ID NO: 225 - protein, 126 aa, synthetic construct
EVQLLESGGGLVQPGGSLRLSCAASGFSFSSFAMAWVRQAPGKGLEWVSAISGRGGNTYYADSVKGRFTISRDNSKNTLYLQMNSLRAEDTAVYYCARRVIRYHSSGYYYKGFDSWGQGTLVTVSS

SEQ ID NO: 226 - protein, 115 aa, synthetic construct
EVQLLESGGGLVQPGGSLRLSCAASGFTFSHYAMSWVRQAPGKGLEWVSAISGSGRRTYYADSVKGRFTISRDNSKNTLYLQMNSLRAEDTAVYYCARGRSLAYWGQGTLVTVSS

SEQ ID NO: 227 - protein, 121 aa, synthetic construct
EVQLLESGEGLVQPGWSLRLSCAASGFTFRSYGMSWVRQAPGKGLEWVSSISGSGVDTYYADSVKGRFTISRDNSKNTLYLQMNSLRAEDTAVYYCAKAAWGVPTTVFDSWGQGTLVTVSS

SEQ ID NO: 228 - protein, 120 aa, synthetic construct
EVQLLESGGGLVQPGGSLRLSCAASGFSFSSYSMSWVRQAPGKGLEWVSGISGRGGSTYYADSVKGRFTISRDNSKNTLYLQMNSLRAEDTAVYYCARVKTVTSLAMDVWGQGTLVTVSS

SEQ ID NO: 229 - protein, 120 aa, synthetic construct; identical to SEQ ID NO: 219

SEQ ID NO: 230 - protein, 123 aa, synthetic construct
EVQLLESGGGLVQPGGSLRLSCAASGFTFSRYGMSWVRQAPGKGLEWVSTISGSGYSTYYADSVKGRFTISRDNSKNTLYLQMNSLRAEDTAVYYCARRRKLGGTSTWYFDLWGQGTLVTVSS

SEQ ID NO: 231 - protein, 116 aa, synthetic construct
EVQLLESGGGLVQPGGSLRLSCAASGFTFSRYAMNWVRQAPGKGLEWVSSISGRGGNTYYADSVKGRFTISRDNSKNTLYLQMNSLRAEDTAVYYCARGRSGYTSWGQGTLVTVSS

SEQ ID NO: 232 - protein, 121 aa, synthetic construct
EVQLLESGGGLVQPGGSLRLSCAASGFTFSKFAMTWVRQAPGKGLEWVSTISGGGGRTYYADSVKGRFTISRDNSKNTLYLQMNSLRAEDTAVYYCARHLTVTTRNGMAVWGQGTLVTVSS

SEQ ID NO: 233 - protein, 118 aa, synthetic construct
EVQLLESGGGLVQPGGSLRLSCAASGFTFSRYTMNWVRQAPGKGLEWVSAISGSCARTYYADSVKGRFTISRDNSKNTLYLQMNSLRAEDTAVYYCARGWSSHWFDPWGQGTLVTVSS

SEQ ID NO: 234 - protein, 116 aa, synthetic construct; identical to SEQ ID NO: 223

SEQ ID NO: 235 - protein, 129 aa, synthetic construct
EVQLLESGGGLVQPGGSLRLSCAASGFSFSGYAMTWVRQAPGKGLEWVSAISGTGVSTYYADSVKGRFTISRDNSKNTLYLQMNSLRAEDTAVYYCARSKRVLRKQLRRYYYSYGMDVWGQGTLVTVSS

SEQ ID NO: 236 - protein, 120 aa, synthetic construct
EVQLLESGGGLVQPGGSLRLSCAASGFTFRRYAMSWVRQAPGKGLEWVSGISASGGRTYYADSVKGRFTISRDNSKNTLYLQMNSLRAEDTAVYYCARRLGGRSGALESWGQGTLVTVSS

SEQ ID NO: 237 - protein, 120 aa, synthetic construct; identical to SEQ ID NO: 218

SEQ ID NO: 238 - protein, 118 aa, synthetic construct; identical to SEQ ID NO: 220

SEQ ID NO: 239 - protein, 121 aa, synthetic construct
EVQLLESGGGLVQPGGSLRLSCAASGFTFSSYAMTWVRQAPGKGLEWVSGISGSGTTTYYADSVKGRFTISRDNSKNTLYLQMNSLRAEDTAVYYCARLFGSGNRKAFDFWGQGTLVTVSS

SEQ ID NO: 240 - protein, 124 aa, synthetic construct
EVQLLESGGGLVQPGGSLRLSCAASGFTFGNFAMSWVRQAPGKGLEWVSAISGRGGSTYYADSVKGRFTISRDNSKNTLYLQMNSLRAEDTAVYYCARRQHFRAAVRGRAFDYWGQGTLVTVSS

SEQ ID NO: 241 - protein, 113 aa, synthetic construct
EVQLLESGGGLVQPGGSLRLSCAASGFMFSHYAMSWVRQAPGKGLEWVSAVSGSGISTYYADSVKGRFTISRDNSKNTLYLQMNSLRAEDTAVYYCAGDIDYWGQGTLVTVSS

SEQ ID NO: 242 - protein, 120 aa, synthetic construct; identical to SEQ ID NO: 222

SEQ ID NO: 243 - protein, 120 aa, synthetic construct
EVQLLESGGGLVQPGGSLRLSCAASGFTFRSYVMTWVRQAPGKGLEWVSSIGGSGGTTYYADSVKGRFTISRDNSKNTLYLQMNSLRAEDTAVYYCARVHRKMNYGTDSWGQGTLVTVSS

SEQ ID NO: 244 - protein, 120 aa, synthetic construct
EVQLLESGGGLVQPGGSLRLSCAASGFTFGRYAMSWVRQAPGKGLEWVSAISGSGADTYYADSVKGRFTISRDNSKNTLYLQMNSLRAEDTAVYYCARDRGDFWRRFDPWGQGTLVTVSS

SEQ ID NO: 245 - protein, 119 aa, synthetic construct
EVQLLESGGGLVQPGGSLRLSCAASGFTFRRYAMSWVRQAPGKGLEWVAAISGSGGTTYYADSVKGRFTISRDNSKNTLYLQMNSLRAEDTAVYYCARGLRWRRYFDRWGQGTLVTVSS

SEQ ID NO: 246 - protein, 117 aa, synthetic construct
EVQLLESGGGLVQPGGSLRLSCAASGFTFSRYGMTWVRQAPGKGLEWVSAISGSGGRTYYADSVKGRFTISRDNSKNTLYLQMNSLRAEDTAVYYCARIYRGAFDYWGQGTLVTVSS

SEQ ID NO: 247 - protein, 118 aa, synthetic construct
EVQLLESGGGLVQPGGSLRLSCAASGFTFSAYAMTWVRQAPGKGLEWVSTITGSGRSTYYADSVKGRFTISRDNSKNTLYLQMNSLRAEDTAVYYCARHRRLRALDSWGQGTLVTVSS

SEQ ID NO: 248 - protein, 117 aa, synthetic construct; identical to SEQ ID NO: 224

SEQ ID NO: 249 - protein, 132 aa, synthetic construct
EVQLLESGGGLVQPGGSLRLSCAASGFTFYSYAMSWVRQAPGKGLEWVSAISGGGGNTYYADSVKGRFTISRDNSKNTLYLQMNSLRAEDTAVYYCARALLYYDYIWGTYRITTSKYYFDYWGQGTLVTVSS

SEQ ID NO: 250 - protein, 119 aa, synthetic construct
EVQLLESGGGLVQPGGSLRLSCAASGFTFSRYTMNWVRQAPGKGLEWVSSISGGGGRTYYAESVKGRFTISRDNSKNTLYLQMNSLRAEDTAVYYCARYRLRPRDWDSWGQGTLVTVSS

SEQ ID NO: 251 - protein, 122 aa, synthetic construct; identical to SEQ ID NO: 217

SEQ ID NO: 252 - protein, 116 aa, synthetic construct
EVQLLESGGGLVQPGGSLRLSCAASGFTFRRSAMSWVRQAPGKGLEWVSAIRGSGGNTYYADSVKGRFTISRDNSKNTLYLQMNSLRAEDTAVYYCARGRAVSDIWGQGTLVTVSS

SEQ ID NO: 253 - protein, 119 aa, synthetic construct
EVQLSESGGGLVQPGGSLRLSCAASGFTFSSYAMSWVRQAPGKGLEWVSAISGSGGSTYYADSVKGRFTISRDNSKNTLYLQMNSLRAEDTAVYYCARAWRYYGDSDYWGQGTLVTVSS

SEQ ID NO: 254 - protein, 116 aa, synthetic construct
EVQLLESGGGLVKPGGSLRLSCAASGFSFSRYAMNWVRQAPGKGLEWVSSISGSGGSTYYADSVKGRFTISRDNSKNTLYLQMNSLRAEDTAVYYCARGRVKFDPWGQGTLVTVSS

SEQ ID NO: 255 - protein, 125 aa, synthetic construct
EVQLLESGGGLVQPGGSLRLSCAASGFTFSSYAMGWVRQAPGKGLEWVSTISGSGGSAFYADSVKGRFTISRDNSKNTLYLQMNSLRAEDTAVYYCAREGTIFGVAYYYYYMDVWGQGTLVTVSS

SEQ ID NO: 256 - protein, 119 aa, synthetic construct; identical to SEQ ID NO: 216

SEQ ID NO: 257 - protein, 118 aa, synthetic construct
EVQLLESGGGLVQPGGSLRLSCAASGFTFGHYAMGWARQAPGKGLEWVSGISSSRGSTYYADSVKGRFTISRDNSKNTLYLQMNSLRAEDTAVYYCTKGIHYGGIDYWGQGTLVTVSS

SEQ ID NO: 258 - protein, 119 aa, synthetic construct
EVQLLESGGGLVQPGGSLRLSCAASGLTFSRYAMSWVRQAPGKGLEWVSGISGSGATTYYADSVKGRFTISRDNSKNTLYLQMNSLRAEDTAVYYCGRYSRGPRYFDYWGQGTLVTVSS

SEQ ID NO: 259 - protein, 123 aa, synthetic construct
EVQLLESGGGLVQPGGSLRLSCAASGFSFSSYAMSWVPQAPGKGLEWVSTISGSGTNTYYADSVKGRFTISRDNSKNTLYLQMNSLRAEDTAVYYCARDGDYVWGSYRFFDYWGQGTLVTVSS

SEQ ID NO: 260 - protein, 118 aa, synthetic construct
EVQLLESGGGLVQPGGSLRLSCAASGFTFDTYAMSWVRQAPGKGLEWVSVVTGSGSSTYYADSVKGRFTISRDNSKNTLYLQMNSLRAKDTAVYYCARGWSSHWFDPWGQGTLVTVSS

SEQ ID NO: 261 - protein, 133 aa, synthetic construct
EVQLLESGGGLVQPGGSLRLSCAASGFNFRSYAMNWVRQAPGKGLEWVSVISGGGGSAYYADSVKGRFTISRDNSKNTLYLQMNSLRAEDTAVYYCVRVKTFRKVGGNLISTLRMRGRAFDLWGQGTLVTVSS

SEQ ID NO: 262 - protein, 121 aa, synthetic construct
EVQLLESGGGLVQPGGSLRLSCAASGFTFGSYGMGWVRQAPGKGLEWVSAISSSGTGTYYADSVKGRFTISRDNSKNTLYLQMNSLRAEDTAVYYCARGMATMVRLGMEYWGQGTLVTVSS

SEQ ID NO: 263 - protein, 126 aa, synthetic construct
EVQLLESGGGLVQPGGSLRLSCAASGFTFNTFAMHWVRQAPGKGLEWVSAITASGGSTYYADSVKGRFTISRDNSKNTLYLQMNSLRAEDTAVYYCARHTPSYYDSFDYFYGMDVWGQGTLVTVSS

SEQ ID NO: 264 - protein, 119 aa, synthetic construct
EVQLLESGGGLVQPGGSLRLSCAASGFTFSTYALTWVRQAPGKGLEWVSGLSGSGGSTYYADSVKGRFTISRDNSKNTLYLQMNSLRAEDTAVYYCAREVGAPGYFQHWGQGTLVTVSS

SEQ ID NO: 265 - protein, 116 aa, synthetic construct; identical to SEQ ID NO: 231

SEQ ID NO: 266 - protein, 125 aa, synthetic construct
EVQLLESGGGLVQPGGSLRLSCAASGFTFGRYAMSWVRQAPGKGLEWVSTISGSGVTTYYADSVKGRFTISRDNSKNTLYLQMNSLRAEDTAVYYCARGRRSYRPFGVVPYIDVWGQGTLVTVSS

SEQ ID NO: 267 - protein, 116 aa, synthetic construct
EVQLLESGGGLVQPGGSLRLSCAASGFMFSSYAMTWVRQAPGKGLEWVSSISGSGGTTFYADSVKGRFTISRDSSKNTLYLQMNSLRAEDTAVYYCARVTRAFDIWGQGTLVTVSS

SEQ ID NO: 268 - protein, 119 aa, synthetic construct
EVQLLESGGGLVQPGGSLRLSCAASGFTFISYAMSWVRQAPGKGLEWVSAISGSGAKTYYADSVKGRFTISRDNSKNTLYLQMNSLRAEDTAVYYCAKDSSDYGEFDYWGQGTLVTVSS

SEQ ID NO: 269 - protein, 123 aa, synthetic construct
EVQLLESGGGLVQPGGSLRLSCAASGFTFNTYVMSWVRQAPGKGLEWVSSISSSGGSTYYADSVKGRFTISRDNSKNTLYPQMNSLRAEDTAVYYCTTADYDILTGYYPIDYWGQGTLVTVSS

SEQ ID NO: 270 - protein, 120 aa, synthetic construct
EVQLLESGGGLVQPGGSLRLSCAASGFSFSNYAMTWVRQAPGKGLEWVSAISGRGGSTYYADSVKGRFIISRDNSKNTLYLQMNSLRAEDTAVYYCTRTTPRYSSGLGYWGQGTLVTVSS

SEQ ID NO: 271 - protein, 121 aa, synthetic construct
EVQLLESGGGLVQPGGSLRLSCAASGFTFRSSAMSWVRQAPGKGLEWVSGISGSGGITYYADSVKGRFTISRDNSKNTLYLQMNSLRAEDTAVYYCARMSRSSRRGPFDYWGQGTLVTVSS

SEQ ID NO: 272 - protein, 129 aa, synthetic construct
EVQLLESGGGLVQPGGSLRLSCAASGFTFSRYTMNWVRQAPGKGLEWVSAISGSGARTYYADSVKGRFTISRDNSKNTLYLQMNSLRAEDTAVYYCARDGSDDFWSGYYWSQYYYMDVWGQGTLVTVSS

SEQ ID NO: 273 - protein, 123 aa, synthetic construct
EVQLLESGGGLVQPGGSPRLSCAASGVTFSTYAMSWVRQAPGKGLEWVSTLSGSGGSTYYADSVKGRFTISRDNSKNTLYLQMNSLRAEDTAVYYCAKDGSVAPAGPYGMDVWGQGTLVTVSS

SEQ ID NO: 274 - protein, 120 aa, synthetic construct
EVQLLESGGGLVQPGGSLRLSCAASGFTFSGYAMNWVRQAPGKGLEWVSGISGSGGDTYYADSVKGRFTISRDNSKNTLYLQMNSLRAEDTAVYYCARDGFGVYYGLDVWGQGTLVTVSS

SEQ ID NO: 275 - protein, 117 aa, synthetic construct
EVQLLESGGGLVQPGGSLRLSCAASGFTFSRYAMSWVRQAPGKGLEWVSGISASGGNTYYADSVKGRFTISRDNSKNTLYLQMNSLRAEDTAVYYCARGRRNGVGVWGQGTLVTVSS

SEQ ID NO: 276 - protein, 118 aa, synthetic construct
EVQLLESGGGLVQPGGSLRLSCAASGFTFINFAMSWVRQAPGKGLEWVSAISGGGTSTYYADSVKGRFTISRDNSKNTLYLQMNSLRAEDTAVYYCASGGYASAFDIWGQGTLVTVSS

SEQ ID NO: 277 - protein, 122 aa, synthetic construct
EVQLLESGGGLVQPGGSLRLSCAASGFTFSAYAMNWVRQAPGKGLEWVSVISGSGGSTHYADSVKGRFTISGDNSKNTLYLQMNSLRAEDTAVYYCARGLTIYDFWSPLSNWGQGTLVTVSS

SEQ ID NO: 278 - protein, 119 aa, synthetic construct
EVQLLESGGGLVQPGGSLRLSCAASGFTFRSYPMSWVRQAPGKGLEWVSVISGSGGKTYYADSVKGRFTISRDNSKNTLYLQMNSLRAEDTAVYYCARGRGTSSPLDYWGQGTLVTVSS

SEQ ID NO: 279 - protein, 121 aa, synthetic construct
EVQLLESGGGLVQPGGSLRLSCAASGFTFSDYAMGWVRQAPGKGLEWVSTISGSGGTTFYADSVKGRFTISRDNSKNTLYLQMNSLRAEDTAVYYCARTYSSSWYGYFDYWGQGTLVTVSS

SEQ ID NO: 280 - protein, 120 aa, synthetic construct
EVQLLESGGGLVQPGGSLRLSCAASGVTFSSYVMSWVRQAPGKGLEWVSTISDTGGSTYYADSVKGRLTISRDNSKNTLYLQMNSLRAEDTAVYYCARDGTIGLKYFHHWGQGTLVTVSS

SEQ ID NO: 281 - protein, 117 aa, synthetic construct
EVQLLESGGGLVQPGGSLRLSCAASGLSYALSWVRQAPGKGLEWVSGISGSGSGTYYADSVKGRFTISRDNSKNTLYLQMNSLRAEDTAVYCCAREDSSSSPPFDYWGQGTLVTVSS

SEQ ID NO: 282 - protein, 121 aa, synthetic construct
EVQLLESGGGLVQPGGSLRPSCAASGFSFSNFAMSWVRQAPGKGLEWVSGISGSGYSTYYADSVKGRFTISRDNSKNTLYLQMNSLRAEETAVYYCATDRPSSYYDSGPIWGQGTLVTVSS

SEQ ID NO: 283 - protein, 118 aa, synthetic construct
EVQLLESGGGLVQPGGSLRLSCAASGFTFSTYTMTWVRQAPGKGLEWVSSISGGGGRTYYAESVKGRFTISRDNSKNTLYLQMNSLRAEDTAVYYCARGWSSHWFDPWGQGTLVTVSS

SEQ ID NO: 284 - protein, 119 aa, synthetic construct
EVQLLESGGGLVQPGGSLRLSCAASGFTFSNFAMGWVRQAPGKGLSGSAISGSGGSTYYTDSVKGRFTISRDNSKNTLYLQMNSLRAEDTAVYYCARDGITGRQHFDYWGQGTLVTVSS

SEQ ID NO: 285 - protein, 115 aa, synthetic construct
EVQLLESGGGLVQPGGSLRLSCAASGFTFGDYGMGWVRQAPGKGLEWVSGISGSGGDTYYTDSVKGRFTISRDNSKNTLYLQMNSLRAEDTAVYYCAKDTSLRKWGQGTLVTVSS

SEQ ID NO: 286 - protein, 122 aa, synthetic construct
EVQLLESGGGLVQPGGSLRLSCAASGFTFSGSAMSWVRQAPGKGLEWVSAISGGGTSTYYADSVKGRFTISRDNSKNTLYLQMNSLRAEDTAVYYCVRDCSSTSCSYAMDVWGQGTLVTVSS

SEQ ID NO: 287 - protein, 116 aa, synthetic construct
EVQLLESGGGLVQPGGSLRLSCAASGFTFSRYTMNWVRQAPGKGLEWVSAISGSGARTYYADSVKGRFTISRDNSKNTLYLQMNSLRAEDTAVYYCARQIPAFDIWGQGTLVTVSS

SEQ ID NO: 288 - protein, 124 aa, synthetic construct
EVQLLESGGGLVQPGGSLRLSCAASGYTFSSYAMTWVRQAPGKGLEWVSTFGGSGGSTYYADSVKGRFTISRDNSKNTLYLQMNSLRAEDTAVYYCAKADTAIESYYYYGMDVWGQGTLVTVSS

SEQ ID NO: 289 - protein, 121 aa, synthetic construct
EVQLLESGGGLVQPGGSLRLSCAASGFTFGTYVMSWVRQAPGKGLEWVSAISGSVGSTYYADSVKGRFTISRDNSKNTLYLQMNSLRAEDTAVYYCTRGFASSWHDVFDYWGQGTLVTVSS

SEQ ID NO: 290 - protein, 122 aa, synthetic construct
EVQLLESGGGLVQPGGSLRLSCAASGFTFSRYTMNWVRQAPGKGLEWVSAISGSGARTYYADSVKGRFTISRDNSKNTLYLQMNSLRAEDTAVYYCARGLRRNKRGSYFDYWGQGTLVTVSS

SEQ ID NO: 291 - protein, 120 aa, synthetic construct; identical to SEQ ID NO: 244

SEQ ID NO: 292 - protein, 122 aa, synthetic construct
EVQLLESGGGLVQPGGSLRLSCAASGFSFSSFAMAWVRQAPGKGLEWVAGISGSGGSTYYADSVKGRFTISRDNSKNTLYLQMNSLRAEDTAVYYCAKDYDRYYYYYGMDVWGQGTLVTVSS

SEQ ID NO: 293 - protein, 120 aa, synthetic construct
EVQLLESGGGLVQPGGSLRLSCAASGFTFSNHAMTWVRQAPGKGLEWVSGVSSSGGSTYYADSVKGRFTISRDNSKNTLYLQMNSLRAEDTAVYYCARVRAAYSSSSDYWGQGTLVTVSS

SEQ ID NO: 294 - protein, 114 aa, synthetic construct
EVQLLESGGGLVQPGGSLRLSCAASGISFSNYAMSWVRQAPGKGLEWVSFTGGSTDYADSVKGRFTISRDNSKNTLYLQMNSLRAEDTAVYYCRSNYYYGMDVWGQGTLVTVSS

SEQ ID NO: 295 - protein, 117 aa, synthetic construct; identical to SEQ ID NO: 224

SEQ ID NO: 296 - protein, 118 aa, synthetic construct
EVQLLESGGGLVQPGGSLRLSCAASGFTFSSHAMNWVRQAPGKGLEWVSAISGSGGHTYYADSVKGRFTISRDNSKNTLYLQMNSLRAEDTAVYYCARLGNFDAFDIWGQGTLVTVSS

SEQ ID NO: 297 - protein, 116 aa, synthetic construct
EVQLLESEGGLVQPGGSLRLSCAASGFTFSSSAMRWVRQAPGKGLEWVSSISVRGGSTYYADSVKGRFTISRDNSKNTLYLQMNSLRAEDTAVYYCARDQQLLDYWGQGTLVTVSS

SEQ ID NO: 298 - protein, 128 aa, synthetic construct
EVQLLESGGGLVQPGGSLRLSCAASGFPFSSYALSWVRQAPGKGLEWVSVISVSGGSTYYADSVKVRFTISRDNSKNTLYLQMNSLRAEDTAVYYCTRQFFPVLVPASNARYYYMDVWGQGTLVTVSS

SEQ ID NO: 299 - protein, 124 aa, synthetic construct
EVQLLESGGGLVQPGGSLRLSCAASGFTFNDYAMTWVRQAPGKGLEWVSSISGSGGTTYYADSVKGRFTISRDNSKNTLYLQMNSLRAEDTAVYYCARVSPYYYDSSGYYFDYWGQGTLVTVSS

SEQ ID NO: 300 - protein, 123 aa, synthetic construct
EVQLLESGGGLVQPGGSLRLSCAASGFTFSSFATTWVRQAPGKGLEWVATISVGGGSTYYADSVKGRFTISRDNSKNTLYLQMNSLRAEDTAVYYCAREDDFWSAFHYYMDVWGQGTLVTVSS

SEQ ID NO: 301 - protein, 113 aa, synthetic construct
EVQLLESGGGLVQPGGSLRLSCAASGFTFRTSAMSWVRQAPGKGLEWVSGISGSGGRTYYADSVKGRFTISRDNSKNTLYLQMNSLRAEDTAVYYCARSAGYWGQGTLVTVSS

SEQ ID NO: 302 - protein, 122 aa, synthetic construct
EVQLVESGGGLVQPGGSLRLSCAASGFTLDAWPMSWFRQAPGKEREVVAVIYTSDGSTYYADSVKGRFTISADNSKNTAYLQMNSLKPEDTAVYYCAASKWYGGFGDTDIEWGQGTLVTVSS

SEQ ID NO: 303 - protein, 121 aa, synthetic construct
EVQLVESGGGLVQPGGSLRLSCAASGGTFSAYAMGWFRQAPGKEREWVASISTSGSTITPYADSVKGRFTISADNSKNTAYLQMNSLKPEDTAVYYCAAIAYEEGVYRWDWGQGTLVTVSS

SEQ ID NO: 304 - protein, 113 aa, synthetic construct
EVQLVESGGGLVQPGGSLRLSCAASGRTFSMGWFRQAPGKEREWVSSIGIAGTPTFYADSVKGRFTISADNSKNTAYLQMNSLKPEDTAVYYCASTDDYGVDWGQGTLVTVSS

SEQ ID NO: 305 - protein, 121 aa, synthetic construct
EVQLVESGGGLVQPGGSLRLSCAASGNAFRSTVMGWFRQAPGKEREFVAVIIDSRTTKYADSVKGRFTISADNSKNTAYLQMNSLKPEDTAVYYCAAVGGATTVTASEWDWGQGTLVTVSS

SEQ ID NO: 306 - protein, 121 aa, synthetic construct
EVQLVESGGGLVQPGGSLRLSCAASGRTFSSIVMGWFRQAPGKEREMVAVIIDSRTTKYADSVKGRFTISADNSKNTAYLQMNSLKPEDTAVYYCAAVGGATTVTASEWDWGQGTLVTVSS

SEQ ID NO: 307 - protein, 118 aa, synthetic construct
EVQLVESGGGLVQPGGSLRLSCAASGRTISTYGMGWFRQAPGKEREWVSGINRDGSTYYADRVKGRFTISADNSKNTAYLQMNSLKPEDTAVYYCALRRLSPPPLLDWGQGTLVTVSS

SEQ ID NO: 308 - protein, 120 aa, synthetic construct
EVQLVESGGGLVQPGGSLRLSCAASGRTSNIYAMGWFRQAPGKEREPVASITPGGRFPAYADSVKGRFTISADNSKNTAYLQMNSLKPEDTAVYYCSTLYYSGLDPVDYWGQGTLVTVSS

SEQ ID NO: 309 - protein, 118 aa, synthetic construct
EVQLVESGGGLVQPGGSLRLSCAASGRTSNIYAMGWFRQAPGKEREFVASLSASGSLTWYADSVKGRFTISADNSKNTAYLQMNSLKPEDTAVYYCAANYGGSVLYNWGQGTLVTVSS

SEQ ID NO: 310 - protein, 123 aa, synthetic construct
EVQLVESGGGLVQPGGSLRLSCAASGFIFSSYWMGWFRQAPGKEREFVATISWSGAYTEYADSVKGRFTISADNSKNTAYLQMNSLKPEDTAVYYCAAANEYWVYVNPNRYTWGQGTLVTVSS

SEQ ID NO: 311 - protein, 121 aa, synthetic construct
EVQLVESGGGLVQPGGSLRLSCAASGRTSNIYAMGWFRQAPGKEREWVASISTSGSTITPYADSVKGRFTISADNSKNTAYLQMNSLKPEDTAVYYCAAVYVSTWGNGYDWGQGTLVTVSS

SEQ ID NO: 312 - protein, 118 aa, synthetic construct
EVQLVESGGGLVQPGGSLRLSCAASGRTFNWYAMGWFRQAPGKEREWVSSIGIAGTPTFYADSVKGRFTISADNSKNTAYLQMNSLKPEDTAVYYCAAVSSNSETFDWGQGTLVTVSS

SEQ ID NO: 313 - protein, 123 aa, synthetic construct
EVQLVESGGGLVQPGGSLRLSCAASGSIFGLNAMGWFRQAPGKEREFVAAISRFGSTDYADSVKGRFTISADNSKNTAYLQMNSLKPEDTAVYYCARSYCTADSCYSSWFDPWGQGTLVTVSS

SEQ ID NO: 314 - protein, 118 aa, synthetic construct
EVQLVESGGGLVQPGGSLRLSCAASGRTSSTATMGWFRQAPGKEREFVGSIDWIPSNIYYADSVKGRFTISADNSKNTAYLQMNSLKPEDTAVYYCAAWGQDGWDGDWGQGTLVTVSS

SEQ ID NO: 315 - protein, 125 aa, synthetic construct
EVQLVESGGGLVQPGGSLRLSCAASGDISSIVAMGWFRQAPGKEREWVSSIDTGGGSNIVYADSVKGRFTISADNSKNTAYLQMNSLKPEDTAVYYCAAGLLDVQYVRQAAGYSWGQGTLVTVSS

SEQ ID NO: 316 - protein, 118 aa, synthetic construct
EVQLVESGGGLVQPGGSLRLSCAASGRTYSISAMGWFRQAPGKEREWVSSIGIAGTPTFYADSVKGRFTISADNSKNTAYLQMNSLKPEDTAVYYCAAGVTGGAAYGWGQGTLVTVSS

SEQ ID NO: 317 - protein, 111 aa, synthetic construct
EVQLVESGGGLVQPGGSLRLSCAASGFSLDYYGMGWFRQAPGKEREGVATINWSGATSYADSVKGRFTISADNSKNTAYLQMNSLKPEDTAVYYCAIPGVWGQGTLVTVSS

SEQ ID NO: 318 - protein, 117 aa, synthetic construct
EVQLVESGGGLVQPGGSLRLSCAASGRDLDYYAMGWFRQAPGKEREWVSSIGIAGTPTFYADSVKGRFTISADNSKNTAYLQMNSLKPEDTAVYYCAVVDLLRGKLWGQGTLVTVSS

SEQ ID NO: 319 - protein, 121 aa, synthetic construct
EVQLVESGGGLVQPGGSLRLSCAASGVTLDLYAMGWFRQAPGKEREWVASISTSGSTITPYADSVKGRFTISADNSKNTAYLQMNSLKPEDTAVYYCAAIAHEEGVYRWDWGQGTLVTVSS

SEQ ID NO: 320 - protein, 120 aa, synthetic construct
EVQLVESGGGLVQPGGSLRLSCAASGRTDSTASMGWFRQAPGKEREEVAAISWSGGRTYYADSVKGRFTISADNSKNTAYLQMNSLKPEDTAVYYCARLAFQGNTVFDLWGQGTLVTVSS

SEQ ID NO: 321 - protein, 123 aa, synthetic construct
EVQLVESGGGLVQPGGSLRLSCAASGFSLDDRVMGWFRQAPGKEREFVAGITLGGSTSYADSVKGRFTISADNSKNTAYLQMNSLKPEDTAVYYCAAAPVPWGTRPSLLTYDWGQGTLVTVSS

SEQ ID NO: 322 - protein, 122 aa, synthetic construct
EVQLVESGGGLVQPGGSLRLSCAASGTITSAVFMGWFRQAPGKEREFVAGIIGSGGATYYADSVKGRFTISADNSKNTAYLQMNSLKPEDTAVYYCAASRYARERDVHAYDWGQGTLVTVSS

SEQ ID NO: 323 - protein, 118 aa, synthetic construct
EVQLVESGGGLVQPGGSLRLSCAASGRTSNIYAMGWFRQAPGKEREWVASISTSGSTITPYADSVKGRFTISADNSKNTAYLQMNSLKPEDTAVYYCAIAHGSSTYNWGQGTLVTVSS

SEQ ID NO: 324 - protein, 118 aa, synthetic construct
EVQLVESGGGLVQPGGSLRLSCAASGRTFSTASMGWFRQAPGKEREWVASISTSGSTITPYADSVKGRFTISADNSKNTAYLQMNSLKPEDTAVYYCAVVDLLRGKLWGQGTLVTVSS

SEQ ID NO: 325 - protein, 117 aa, synthetic construct
EVQLVESGGGLVQPGGSLRLSCAASGGTAYAMGWFRQAPGKEREWVASISTSGSTITPYADSVKGRFTISADNSKNTAYLQMNSLKPEDTAVYYCAAASRSGSGYDWGQGTLVTVSS

SEQ ID NO: 326 - protein, 118 aa, synthetic construct
EVQLVESGGGLVQPGGSLRLSCAASGGTFNGRAMGWFRQAPGKEREGVATINSGGGTNYADSVKGRFTISADNSKNTAYLQMNSLKPEDTAVYYCALRRLSPPPLLDWGQGTLVTVSS

SEQ ID NO: 327 - protein, 119 aa, synthetic construct
EVQLVESGGGLVQPGGSLRLSCAASGLTTVYTMGWFRQAPGKERESVASISWTGGTTYYADSVKGRFTISADNSKNTAYLQMNSLKPEDTAVYYCAAIAHEEGVYRWDWGQGTLVTVSS

SEQ ID NO: 328 - protein, 123 aa, synthetic construct
EVQLVESGGGLVQPGGSLRLSCAASGGTISTYAIGWFRQAPGKEREGVAAISPGNNTHYADSVKGRFTISADNSKNTAYLQMNSLKPEDTAVYYCAARPVRVDDISLPVGFDWGQGTLVTVSS

SEQ ID NO: 329 - protein, 117 aa, synthetic construct
EVQLVESGGGLVQPGGSLRLSCAASGRTISRYTMGWFRQAPGKEREFVAGIWSGGYTHYADSVKGRFTISADNSKNTAYLQMNSLKPEDTAVYYCAAVSSNTEIFDWGQGTLVTVSS

SEQ ID NO: 330 - protein, 117 aa, synthetic construct
EVQLVESGGGLVQPGGSLRLSCAASGGFSVYAMGWFRQAPGKEREWVSSTSTGGGGTYYADSVKGRFTISADNSKNTAYLQMNSLKPEDTAVYYCAANVGVTGSYEWGQGTLVTVSS

SEQ ID NO: 331 - protein, 125 aa, synthetic construct
EVQLVESGGGLVQPGGSLRLSCAASGDISSIVAMGWFRQAPGKEREWVASISTSGSTITPYADSVKGRFTISADNSKNTAYLQMNSLKPEDTAVYYCAAGAVRYGVSTSPMNYNWGQGTLVTVSS

SEQ ID NO: 332 - protein, 112 aa, synthetic construct
EVQLVESGGGLVQPGGSLRLSCAASGFTFRNFGMGWFRQAPGKEREFVALINVGGVAKYADSVKGRFTISADNSKNTAYLQMNSLKPEDTAVYYCTTDARHWGQGTLVTVSS

SEQ ID NO: 333 - protein, 117 aa, synthetic construct
EVQLVESGGGLVQPGGSLRLSCAASGFTLGDYVMGWFRQAPGKEREFVAVIYTSDGSTYYADSVKGRFTISADNSKNTAYLQMNSLKPEDTAVYYCVVSFSTRGPYWGQGTLVTVSS

SEQ ID NO: 334 - protein, 116 aa, synthetic construct
EVQLVESGGGLVQPGGSLRLSCAASGGTFSTHWMGWFRQAPGKEREEVAAISWIIGSTYYADSVKGRFTISADNSKNTAYLQMNSLKPEDTAVYYCATSGSGSPNWGQGTLVTVSS

SEQ ID NO: 335 - protein, 121 aa, synthetic construct
EVQLVESGGGLVQPGGSLRLSCAASGSTFSNAVMGWFRQAPGKEREFVAVIIDSRTTKYADSVKGRFTISADNSKNTAYLQMNSLKPEDTAVYYCAAVGGATTVTASEWDWGQGTLVTVSS

SEQ ID NO: 336 - protein, 117 aa, synthetic construct
EVQLVESGGGLVQPGGSLRLSCAASGLTISSLTMGWFRQAPGKEREFVAGIWSGGYTHYADSVKGRFTISADNSKNTAYLQMNSLKPEDTAVYYCAAVSSNTEIFDWGQGTLVTVSS

SEQ ID NO: 337 - protein, 121 aa, synthetic construct
EVQLVESGGGLVQPGGSLRLSCAASGSIYSLVAMGWFRQAPGKEREWMGVIAYDGSTYYADSVKGRFTISADNSKNTAYLQMNSLKPEDTAVYYCAAVGGATTVTASEWDWGQGTLVTVSS

SEQ ID NO: 338 - protein, 125 aa, synthetic construct
EVQLVESGGGLVQPGGSLRLSCAASGGTFGSYAMGWFRQAPGKEREFVAAINWSGARTYYADSVKGRFTISADNSKNTAYLQMNSLKPEDTAVYYCAVSQPLNYYTYYDARRYDWGQGTLVTVSS

SEQ ID NO: 339 - protein, 121 aa, synthetic construct
EVQLVESGGGLVQPGGSLRLSCAASGFTFSNHIMGWFRQAPGKERELVAVIIDSRTTKYADSVKGRFTISADNSKNTAYLQMNSLKPEDTAVYYCAAVGGATTVTASEWDWGQGTLVTVSS

SEQ ID NO: 340 - protein, 120 aa, synthetic construct
EVQLVESGGGLVQPGGSLRLSCAASGGTFSVYAMGWFRQAPGKEREAVASISTSGGSTYYADSVKGRFTISADNSKNTAYLQMNSLKPEDTAVYYCAIGGTLYDRRRFEWGQGTLVTVSS

SEQ ID NO: 341 - protein, 122 aa, synthetic construct
EVQLVESGGGLVQPGGSLRLSCAASGRTFSDYVMGWFRQAPGKEREIVAAIAWTGTTDYADSVKGRFTISADNSKNTAYLQMNSLKPEDTAVYYCAARIRGKVTVDNFDYAWGQGTLVTVSS

SEQ ID NO: 342 - protein, 123 aa, synthetic construct
EVQLVESGGGLVQPGGSLRLSCAASGGTLSSYIMGWFRQAPGKEREGVAAIDSDGSTSYADSVKGRFTISADNSKNTAYLQMNSLKPEDTAVYYCAARPVRVDDISLPVGFDWGQGTLVTVSS

SEQ ID NO: 343 - protein, 116 aa, synthetic construct
EVQLVESGGGLVQPGGSLRLSCAASGFILDYYAMGWFRQAPGKEREWVSSIGIAGTPTFYADSVKGRFTISADNSKNTAYLQMNSLKPEDTAVYYCAGRLSNGLDWGQGTLVTVSS

SEQ ID NO: 344 - protein, 117 aa, synthetic construct
EVQLVESGGGLVQPGGSLRLSCAASGRTYAMGWFRQAPGKEREWVASISTSGSTITPYADSVKGRFTISADNSKNTAYLQMNSLKPEDTAVYYCAANVASGLKILQWGQGTLVTVSS

SEQ ID NO: 345 - protein, 115 aa, synthetic construct
EVQLVESGGGLVQPGGSLRLSCAASGDYYAMGWFRQAPGKEREWVSSIGIAGTPTFYADSVKGRFTISADNSKNTAYLQMNSLKPEDTAVYYCAANVGVTGSYEWGQGTLVTVSS

SEQ ID NO: 346 - protein, 117 aa, synthetic construct
EVQLVESGGGLVQPGGSLRLSCAASGRTLSSYTMGWFRQAPGKEREFVAGIWSGGYTHYADSVKGRFTISADNSKNTAYLQMNSLKPEDTAVYYCAAVSSNSETFDWGQGTLVTVSS

SEQ ID NO: 347 - protein, 115 aa, synthetic construct
EVQLVESGGGLVQPGGSLRLSCAASGFTFSDIAMGWFRQAPGKEREFVAAINWSGGSTKYADSVKGRFTISADNSKNTAYLQMNSLKPEDTAVYYCAYSGIGTDWGQGTLVTVSS

SEQ ID NO: 348 - protein, 123 aa, synthetic construct
EVQLVESGGGLVQPGGSLRLSCAASGRTFSMGWFRQAPGKEREWVASISTSGSTITPYADSVKGRFTISADNSKNTAYLQMNSLKPEDTAVYYCAAQGSLYDDYDGLPIKYDWGQGTLVTVSS

SEQ ID NO: 349 - protein, 121 aa, synthetic construct
EVQLVESGGGLVQPGGSLRLSCAASGTTFSSDVMGWFRQAPGKERELVAVIIDSRTTKYADSVKGRFTISADNSKNTAYLQMNSLKPEDTAVYYCAAVGGATTVTASEWDWGQGTLVTVSS

SEQ ID NO: 350 - protein, 118 aa, synthetic construct
EVQLVESGGGLVQPGGSLRLSCAASGRTVTMGWFRQAPGKEREFVAGINWESGSTDYADSVKGRFTISADNSKNTAYLQMNSLKPEDTAVYYCAALALGTDQSSTFDWGQGTLVTVSS

SEQ ID NO: 351 - protein, 121 aa, synthetic construct
EVQLVESGGGLVQPGGSLRLSCAASGGTFNVYAMGWFRQAPGKEREWVASISTSGSTITPYADSVKGRFTISADNSKNTAYLQMNSLKPEDTAVYYCAAVYVSTWGNGYDWGQGTLVTVSS

SEQ ID NO: 352 - protein, 118 aa, synthetic construct
EVQLVESGGGLVQPGGSLRLSCAASGVTLDLYAMGWFRQAPGKEREWVSSIGIAGTPTFYADSVKGRFTISADNSKNTAYLQMNSLKPEDTAVYYCAANYGGSVLYNWGQGTLVTVSS

SEQ ID NO: 353 - protein, 121 aa, synthetic construct
EVQLVESGGGLVQPGGSLRLSCAASGGTISTYAMGWFRQAPGKEREWVASISTSGSTITPYADSVKGRFTISADNSKNTAYLQMNSLKPEDTAVYYCAAIAYEEGVYRWDWGQGTLVTVSS

SEQ ID NO: 354 - protein, 121 aa, synthetic construct
EVQLVESGGGLVQPGGSLRLSCAASGRTPSIIAMGWFRQAPGKERELVAVIIDSRTTKYADSVKGRFTISADNSKNTAYLQMNSLKPEDTAVYYCAAVGGATTVTASEWDWGQGTLVTVSS

SEQ ID NO: 355 - protein, 119 aa, synthetic construct
EVQLVESGGGLVQPGGSLRLSCAASGNIPPINAMGWFRQAPGKEREWVASISTSGSTITPYADSVKGRFTISADNSKNTAYLQMNSLKPEDTAVYYCAARSGWSGQYDWGQGTLVTVSS

SEQ ID NO: 356 - protein, 121 aa, synthetic construct
EVQLVESGGGLVQPGGSLRLSCAASGEIASIIAMGWFRQAPGKERELVAVIIGGGSTNYADSVKGRFTISADNSKNTAYLQMNSLKPEDTAVYYCAAVGGATTVTASEWDWGQGTLVTVSS

SEQ ID NO: 357 - protein, 124 aa, synthetic construct
EVQLVESGGGLVQPGGSLRLSCAASGFSLADYAMGWFRQAPGKEREGVAAIYSDGGSADYADSVKGRFTISADNSKNTAYLQMNSLKPEDTAVYYCAARPVRVDDISLPVGFDWGQGTLVTVSS

SEQ ID NO: 358 - protein, 125 aa, synthetic construct
EVQLVESGGGLVQPGGSLRLSCAASGDIGSINSMGWFRQAPGKEREFLASVSWGFGSTYYADSVKGRFTISADNSKNTAYLQMNSLKPEDTAVYYCAVNRLLYYSSGYYQTSVDWGQGTLVTVSS

SEQ ID NO: 359 - protein, 116 aa, synthetic construct
EVQLVESGGGLVQPGGSLRLSCAASGFSFGDYAMGWFRQAPGKEREGVAAITSGGRTNYADSVKGRFTISADNSKNTAYLQMNSLKPEDTAVYYCAGRWDIVGAIWGQGTLVTVSS

SEQ ID NO: 360 - protein, 117 aa, synthetic construct
EVQLVESGGGLVQPGGSLRLSCAASGGTAYAMGWFRQAPGKEREWVASISTSGSTITPYADSVKGRFTISADNSKNTAYLQMNSLKPEDTAVYYCAANVGVTGSYEWGQGTLVTVSS

SEQ ID NO: 361 - protein, 122 aa, synthetic construct
EVQLVESGGGLVQPGGSLRLSCAASGGTISTYAMGWFRQAPGKEREFVAAIRWSDGSSYYADSVKGRFTISADNSKNTAYLQMNSLKPEDTAVYYCAVYDILTGYNGAFPIWGQGTLVTVSS

SEQ ID NO: 362 - protein, 118 aa, synthetic construct
EVQLVESGGGLVQPGGSLRLSCAASGYTFRARAYVMGWFRQAPGKERELVASITSDDRTNYADSVKGRFTISADNSKNTAYLQMNSLKPEDTAVYYCAGRWDIVGAIWGQGTLVTVSS

SEQ ID NO: 363 - protein, 117 aa, synthetic construct
EVQLVESGGGLVQPGGSLRLSCAASGDIFTLASMGWFRQAPGKEREFVSSINWSGTHTYYADSVKGRFTISADNSKNTAYLQMNSLKPEDTAVYYCALLDTARGVGWGQGTLVTVSS

SEQ ID NO: 364 - protein, 117 aa, synthetic construct
EVQLVESGGGLVQPGGSLRLSCAASGRTLSSIYAMGWFRQAPGKEREGVAAIYSGGITTYADSVKGRFTISADNSKNTAYLQMNSLKPEDTAVYYCAAFDGYSGSDWGQGTLVTVSS

SEQ ID NO: 365 - protein, 121 aa, synthetic construct
EVQLVESGGGLVQPGGSLRLSCAASGSIYSLVAMGWFRQAPGKEREMVAVIIDSRTTKYADSVKGRFTISADNSKNTAYLQMNSLKPEDTAVYYCAAVGGATTVTASEWDWGQGTLVTVSS

SEQ ID NO: 366 - protein, 117 aa, synthetic construct
EVQLVESGGGLVQPGGSLRLSCAASGGTLDYYAMGWFRQAPGKEREWVSSIGIAGTPTFYADSVKGRFTISADNSKNTAYLQMNSLKPEDTAVYYCAANRGLAGPAWGQGTLVTVSS

SEQ ID NO: 367 - protein, 120 aa, synthetic construct
EVQLVESGGGLVQPGGSLRLSCAASGSIVAMGWFRQAPGKEREFVATINTAGWTTYADSVKGRFTISADNSKNTAYLQMNSLKPEDTAVYYCAAAPVPWGTRPSLFTYDWGQGTLVTVSS

SEQ ID NO: 368 - protein, 123 aa, synthetic construct
EVQLVESGGGLVQPGGSLRLSCAASGRAFSVYAMGWFRQAPGKEREGVASISTSGSTITPYADSVKGRFTISADNSKNTAYLQMNSLKPEDTAVYYCAALIKPSSTDRIFEEWGQGTLVTVSS

SEQ ID NO: 369 - protein, 120 aa, synthetic construct
EVQLVESGGGLVQPGGSLRLSCAASGTIVNINVMGWFRQAPGKEREPVATITADGITNYADSVKGRFTISADNSKNTAYLQMNSLKPEDTAVYYCVRVDWALNAAPLDNWGQGTLVTVSS

SEQ ID NO: 370 - protein, 117 aa, synthetic construct
EVQLVESGGGLVQPGGSLRLSCAASGNIDRLYAMGWFRQAPGKEREWVSSIGIAGTPTFYADSVKGRFTISADNSKNTAYLQMNSLKPEDTAVYYCAGRWLEIGAEWGQGTLVTVSS

SEQ ID NO: 371 - protein, 121 aa, synthetic construct
EVQLVESGGGLVQPGGSLRLSCAASGRTLSVYAMGWFRQAPGKEREWVASISTSGSTITPYADSVKGRFTISADNSKNTAYLQMNSLKPEDTAVYYCAAIAYEEGVYRWDWGQGTLVTVSS

SEQ ID NO: 372 - protein, 118 aa, synthetic construct
EVQLVESGGGLVQPGGSLRLSCAASGRTSNIYAMGWFRQAPGKEREWVASISTSGSTITPYADSVKGRFTISADNSKNTAYLQMNSLKPEDTAVYYCAANAESGPYTWGQGTLVTVSS

SEQ ID NO: 373 - protein, 117 aa, synthetic construct
EVQLVESGGGLVQPGGSLRLSCAASGRPFSMYAMGWFRQAPGKEREFVASISWSGGHTFYADSVKGRFTISADNSKNTAYLQMNSLKPEDTAVYYCAVSSGLVQRDWGQGTLVTVSS

SEQ ID NO: 374 - protein, 120 aa, synthetic construct
EVQLVESGGGLVQPGGSLRLSCAASGDISSIVAMGWFRQAPGKEREWVSSIGIAGTPTFYADSVKGRFTISADNSKNTAYLQMNSLKPEDTAVYYCAGRSIGVDDMPYVWGQGTLVTVSS

SEQ ID NO: 375 - protein, 121 aa, synthetic construct
EVQLVESGGGLVQPGGSLRLSCAASGFTFSSAIMGWFRQAPGKERELVAVIIDSRTTKYADSVKGRFTISADNSKNTAYLQMNSLKPEDTAVYYCAAVGGATTVTASEWDWGQGTLVTVSS

SEQ ID NO: 376 - protein, 118 aa, synthetic construct
EVQLVESGGGLVQPGGSLRLSCAASGGTFSVYAMGWFRQAPGKEREWVSSIGIAGTPTFYADSVKGRFTISADNSKNTAYLQMNSLKPEDTAVYYCAANVGVTGSYEWGQGTLVTVSS

SEQ ID NO: 377 - protein, 121 aa, synthetic construct
EVQLVESGGGLVQPGGSLRLSCAASGSIFTIYAMGWFRQAPGKEREWVASISTSGSTITPYADSVKGRFTISADNSKNTAYLQMNSLKPEDTAVYYCATTEYSGYDAVNYWGQGTLVTVSS

SEQ ID NO: 378 - protein, 121 aa, synthetic construct
EVQLVESGGGLVQPGGSLRLSCAASGRTFSSYVMGWFRQAPGKEREFVAVIIDSRTTKYADSVKGRFTISADNSKNTAYLQMNSLKPEDTAVYYCAAVGGATTVTASEWDWGQGTLVTVSS

SEQ ID NO: 379 - protein, 120 aa, synthetic construct
EVQLVESGGGLVQPGGSLRLSCAASGFTLDDYAMGWFRQAPGKEREEVAAISWIIGSTKYADSVKGRFTISADNSKNTAYLQMNSLKPEDTAVYYCAAIVYEEGVYRWDWGQGTLVTVSS

SEQ ID NO: 380 - protein, 112 aa, synthetic construct
EVQLVESGGGLVQPGGSLRLSCAASGRTFSMGWFRQAPGKEREAVASISWSGGSAFYADSVKGRFTISADNSKNTAYLQMNSLKPEDTAVYYCAAIGGGAVWGQGTLVTVSS

SEQ ID NO: 381 - protein, 121 aa, synthetic construct
EVQLVESGGGLVQPGGSLRLSCAASGRTFSPIAMGWFRQAPGKEREMVAVIIDSRTTKYADSVKGRFTISADNSKNTAYLQMNSLKPEDTAVYYCAAVGGATTVTASEWDWGQGTLVTVSS

SEQ ID NO: 382 - protein, 121 aa, synthetic construct
EVQLVESGGGLVQPGGSLRLSCAASGVTLDLYAMGWFRQAPGKEREWVASISTSGSTITPYADSVKGRFTISADNSKNTAYLQMNSLKPEDTAVYYCAAIAYEEGVYRWDWGQGTLVTVSS

SEQ ID NO: 383 - protein, 121 aa, synthetic construct
EVQLVESGGGLVQPGGSLRLSCAASGRTFSTLAMGWFRQAPGKEREWVASISTSGSTITPYADSVKGRFTISADNSKNTAYLQMNSLKPEDTAVYYCAAIAYEEGVYRWDWGQGTLVTVSS

SEQ ID NO: 384 - protein, 117 aa, synthetic construct
EVQLVESGGGLVQPGGSLRLSCAASGRSISDYTMGWFRQAPGKEREFVAGIWSGGYTHYADSVKGRFTISADNSKNTAYLQMNSLKPEDTAVYYCAAVSSNSETFDWGQGTLVTVSS

SEQ ID NO: 385 - protein, 123 aa, synthetic construct
EVQLVESGGGLVQPGGSLRLSCAASGGIISNYHMGWFRQAPGKEREGVAAIYSDGSTYYADRVKGRFTISADNSKNTAYLQMNSLKPEDTAVYYCAARPVRVDDISLPVGFDWGQGTLVTVSS

SEQ ID NO: 386 - protein, 118 aa, synthetic construct
EVQLVESGGGLVQPGGSLRLSCAASGRTFSTAGMGWFRQAPGKEREWVASIITSGSTITPYADSVKGRFTISADNSKNTAYLQMNSLKPEDTAVYYCAVVDLLRGKLWGQGTLVTVSS

SEQ ID NO: 387 - protein, 121 aa, synthetic construct
EVQLVESGGGLVQPGGSLRLSCAASGGTFSTYAMGWFRQAPGKEREWVASISTSGSTITPYADSVKGRFTISADNSKNTAYLQMNSLKPEDTAVYYCAAIAYEEGVYRWDWGQGTLVTVSS

SEQ ID NO: 388 - protein, 117 aa, synthetic construct
EVQLVESGGGLVQPGGSLRLSCAASGGSFSVKDMGWFRQAPGKEREFVSSISGGTTYADSVKGRFTISADNSKNTAYLQMNSLKPEDTAVYYCAAIAYEEGVYRWDWGQGTLVTVSS

SEQ ID NO: 389 - protein, 123 aa, synthetic construct
EVQLVESGGGLVQPGGSLRLSCAASGRTSHGYGGYGMGWFRQAPGKEREEVAAISSSGSSTVYADSVKGRFTISADNSKNTAYLQMNSLKPEDTAVYYCAAIAYEEGVYRWDWGQGTLVTVSS

SEQ ID NO: 390 - protein, 121 aa, synthetic construct
EVQLVESGGGLVQPGGSLRLSCAASGSIYSLVAMGWFRQAPGKEREAVAGIVSGGSTSYADSVKGRFTISADNSKNTAYLQMNSLKPEDTAVYYCAAVGGATTVTASEWDWGQGTLVTVSS

SEQ ID NO: 391 - protein, 118 aa, synthetic construct
EVQLVESGGGLVQPGGSLRLSCAASGVTLDLYAMGWFRQAPGKEREAVASISSSGSSIYYADSVKGRFTISADNSKNTAYLQMNSLKPEDTAVYYCAANYGGSVLYNWGQGTLVTVSS

SEQ ID NO: 392 - protein, 116 aa, synthetic construct
EVQLVESGGGLVQPGGSLRLSCAASGGTFGSYAMGWFRQAPGKEREGVAAIYTGGITTYADSVKGRFTISADNSKNTAYLQMNSLKPEDTAVYYCAAFDGYSGSDWGQGTLVTVSS

SEQ ID NO: 393 - protein, 120 aa, synthetic construct
EVQLVESGGGLVQPGGSLRLSCAASGRTHSTASMGWFRQAPGKEREEVAAISWSGGRTYYADSVKGRFTISADNSKNTAYLQMNSLKPEDTAVYYCARLAFQGNTVFDLWGQGTLVTVSS

SEQ ID NO: 394 - protein, 119 aa, synthetic construct
EVQLVESGGGLVQPGGSLRLSCAASGFTFSRFSTYVMGWFRQAPGKEREGVAAIDSDGRTRYADSVKGRFTISADNSENTAYLQMNSLKPEDTAVYYCAGRWDIVGAIWGQGTLVTVSS

SEQ ID NO: 395 - protein, 110 aa, synthetic construct
EVQLVESGGGLVQPGGSLRLSCAASGFSLDYYGMGWFRQAPGKEREGVATINWSGATYADSVKGRFTISADNSKNTAYLQMNSLKPEDTAVYYCAIPGVWGQGTLVTVSS

SEQ ID NO: 396 - protein, 119 aa, synthetic construct
EVQLVESGGGLVQPGGSLRLSCAASGDISSIVAMGWFRQAPGKEREWVSSGIAGTPTFYADSVKGRFTISADNSKNTAYLQMNSLKPEDTAVYYCAGRSIGVDDMPYVWGQGTLVTVSS

SEQ ID NO: 397 - protein, 112 aa, synthetic construct
EVQLVESGGGLVQPGGSLRLSCAASGRTFSGWFRQAPGKEREWVSSIGIAGTPTFYADSVKGRFTISADNSKNTAYLQMNSLKPEDTAVYYCASTDDYGVDWGQGTLVTVSS

SEQ ID NO: 398 - protein, 111 aa, synthetic construct
EVQLVESGGGLVQPGGSLRLSCAASGFRFSSYGMGWFRQAPGKEREGVAAIRWDGSTDYADSVKGRFTISADNSKNTAYLQMNSLKPEDTAVYYCAIPGVWGQGTLVTVSS

SEQ ID NO: 399 - protein, 116 aa, synthetic construct
EVQLVESGGGLVQPGGSLRLSCAASGLTFSDYIMGWFRQAPGKERELVAGITSVGNTYADSVKGRFTISADNSKNTAYLQMNSLKPEDTAVYYCAMRSVTRGSSDWGQGTLVTVSS

SEQ ID NO: 400 - protein, 121 aa, synthetic construct
EVQLVESGGGLVQPGGSLRLSCAASGRIFSTYFMGWFRQAPGKERELVAVIIDSRTTKYADSVKGRFTISADNSKNTAYLQMNSLKPEDTAVYYCAAVGGATTVTASEWDWGQGTLVTVSS

SEQ ID NO: 401 - protein, 121 aa, synthetic construct
EVQLVESGGGLVQPGGSLRLSCAASGRTFSSYAMGWFRQAPGKEREWVASISTSGSTITPYADSVKGRFTISADNSKNTAYLQMNSLKPEDTAVYYCAAIAYEEGVYRWDWGQGTLVTVSS

SEQ ID NO: 402 - protein, 116 aa, synthetic construct
EVQLVESGGGLVQPGGSLRLSCAASGFTFADYAMGWFRQAPGKEREAVASISSFGSTYYADSVKGRFTISADNSKNTAYLQMNSLKPEDTAVYYCAGRWDIVGAIWGQGTLVTVSS

SEQ ID NO: 403 - protein, 116 aa, synthetic construct
EVQLVESGGGLVQPGGSLRLSCAASGFPFGMYGMGWFRQAPGKEREVVAVIYTSDGSTYYADSVKGRFTISADNSKNTAYLQMNSLKPEDTAVYYCASGGAANGYWGQGTLVTVSS

SEQ ID NO: 404 - protein, 122 aa, synthetic construct
EVQLVESGGGLVQPGGSLRLSCAASGDISSIVAMGWFRQAPGKERESVASITTGSDWTYYADSVKGRFTISADNSKNTAYLQMNSLKPEDTAVYYCAARVVVRTAHGFEDNWGQGTLVTVSS

SEQ ID NO: 405 - protein, 117 aa, synthetic construct
EVQLVESGGGLVQPGGSLRLSCAASGYTFRARAYVMGWFRQAPGKERELVASITSDDRTYADSVKGRFTISADNSKNTAYLQMNSLKPEDTAVYYCAGRWDIVGAIWGQGTLVTVSS

SEQ ID NO: 406 - protein, 121 aa, synthetic construct
EVQLVESGGGLVQPGGSLRLSCAASGNIDGIITMGWFRQAPGKEREFVAGITQTSGRTDYADSVKGRFTISADNSKNTAYLQMNSLKPEDTAVYYCAALALGTDQSSTFDWGQGTLVTVSS

SEQ ID NO: 407 - protein, 118 aa, synthetic construct
EVQLVESGGGLVQPGGSLRLSCAASGFSFDDDYVMGWFRQAPGKEREGVAAINWRGDITIYADSVKGRFTISADNSKNTAYLQMNSLKPEDTAVYYCTRGLYGDSFHWGRGTLVTVSS

SEQ ID NO: 408 - protein, 124 aa, synthetic construct
EVQLVESGGGLVQPGGSLRLSCAASGRTISVYAMGWFRQAPGKEREWVASISTSGSTITPYADSVKGRFTISADNSKNTAYLQMNSLKPEDTAVYYCAAAYSGHSSGRVSDFLWGQGTLVTVSS

SEQ ID NO: 409 - protein, 121 aa, synthetic construct
EVQLVESGGGLVQPGGSLRLSCAASGRTFSTYAMGWFRQAPGKEREWVASISTSGSTITPYADSVKGRFTISADNSKNTAYLQMNSLKPEDTAVYYCAAIAYEEGVYRWDWGQGTLVTVSS

SEQ ID NO: 410 - protein, 116 aa, synthetic construct
EVQLVESGGGLVQPGGSLRLSCAASGRTFSKYAMGWFRQAPGKERELVALINWSSGITVYADSVKGRFTISADNSKNTAYLQMNSLKPEDTAVYYCARASRGMDVWGQGTLVTVSS

SEQ ID NO: 411 - protein, 116 aa, synthetic construct
EVQLVESGGGLVQPGGSLRLSCAASGITLDYYAMGWFRQAPGKEREAVASISTGGGSTYYADSVKGRFTISADNSKNTAYLQMNSLKPEDTAVYYCAGRLSNGLDWGQGTLVTVSS

SEQ ID NO: 412 - protein, 121 aa, synthetic construct
EVQLVESGGGLVQPGGSLRLSCAASGGAFSGLVMGWFRQAPGKEREMVAVIIDSRTTKYADSVKGRFTISADNSKNTAYLQMNSLKPEDTAVYYCAAVGGATTVTASEWDWGQGTLVTVSS

SEQ ID NO: 413 - protein, 116 aa, synthetic construct
EVQLVESGGGLVQPGGSLRLSCAASGFTFGDYAMGWFRQAPGKEREWVASITSSGSTNYADSVKGRFTISADNSKNTAYLQMNSLKPEDTAVYYCAGRWLEIGAEWGQGTLVTVSS

SEQ ID NO: 414 - protein, 115 aa, synthetic construct
EVQLVESGGGLVQPGGSLRLSCAASGFTFSDYAMGWFRQAPGKEREFVAAITWNSGRTNYADSVKGRFTISADNSKNTAYLQMNSLKPEDTAVYYCAYSGIGTDWGQGTLVTVSS

SEQ ID NO: 415 - protein, 113 aa, synthetic construct
EVQLVESGGGLVQPGGSLRLSCAASGRTFSNGPMGWFRQAPGKEREGVASINTRGGDSTYYADSVKGRFTISADNSKNTAYLQMNSLKPEDTAVYYCAIPGVWGQGTLVTVSS

SEQ ID NO: 416 - protein, 121 aa, synthetic construct
EVQLVESGGGLVQPGGSLRLSCAASGRTYSISAMGWFRQAPGKEREWVASISTSGSTITPYADSVKGRFTISADNSKNTAYLQMNSLKPEDTAVYYCAAASFAPGSRGYDWGQGTLVTVSS

SEQ ID NO: 417 - protein, 118 aa, synthetic construct
EVQLVESGGGLVQPGGSLRLSCAASGRTYDAMGWFRQAPGKEREWVSSISPGGLFPYYADSVKGRFTISADNSKNTAYLQMNSLKPEDTAVYYCAAVYVSTWGNGYDWGQGTLVTVSS

SEQ ID NO: 418 - protein, 116 aa, synthetic construct
EVQLVESGGGLVQPGGSLRLSCAASGNIDRLYAMGWFRQAPGKEREWVSSIGIAGTPTFYADSVKGRFTISADNSKNTAYLQMNSLKPEDTAVYYCAAKTGTSFVWGQGTLVTVSS

SEQ ID NO: 419 - protein, 120 aa, synthetic construct
EVQLVESGGGLVQPGGSLRLSCAASGFTFDDYPMGWFRQAPGKEREAVASIWRSANTYYADSVKGRFTISADNSKNTAYLQMNILKPEDTAVYYCATVSPDYYGSRSFYWGQGTLVTVSS

SEQ ID NO: 420 - protein, 117 aa, synthetic construct
EVQLVESGGGLVQPGGSLRLSCAASGNIDGIITMGWFRQAPGKEREGVAAIRWSGGSAFYADSVKGRFTISADNSKNTAYLQMNSLKPEDTAVYYCAALDITTAASWGQGTLVTVSS

SEQ ID NO: 421 - protein, 117 aa, synthetic construct
EVQLVESGGGLVQPGGSLRLSCAASGFSFDDDYVMGWFRQAPGKEREMVARITSGGSTGYADSVKGRFTISADNSKNTAYLQMNSLKPEDTAVYYCAGRWLEIGAEWGQGTLVTVSS

SEQ ID NO: 422 - protein, 116 aa, synthetic construct
EVQLVESGGGLVQPGGSLRLSCAASGFTFGHYAMGWFRQAPGKEREGVAAIYSGGITTYADSVKGRFTISADNSKNTAYLQMNSLKPEDTAVYYCAAFDGYSGSDWGQGTLVTVSS

SEQ ID NO: 423 - protein, 117 aa, synthetic construct
EVQLVESGGGLVQPGGSLRLSCAASGRNFRRNSMGWFRQAPGKEREFVAVISWNNNYIHYADSVKGRFTISADNSKNTAYLQMNSLKPEDTAVYYCAAAEPAGVYDWGQGTLVTVSS

SEQ ID NO: 424 - protein, 113 aa, synthetic construct
EVQLVESGGGLVQPGGSLRLSCAASGGRFSDYGMGWFRQAPGKEREEVAAISWIIGSTYYADSVKGRFTISADNSKNTAYLQMNSLKPEDTAVYYCASPGLGWGQGTLVTVSS

SEQ ID NO: 425 - protein, 116 aa, synthetic construct
EVQLVESGGGLVQPGGSLRLSCAASGIPSSIRAMGWFRQAPGKEREFVAAITPTSYADSVKGRFTISADNSKNTAYLQMNSLKPEDTAVYYCAAIAYEEGVYRWDWGQGTLVTVSS

SEQ ID NO: 426 - protein, 115 aa, synthetic construct
EVQLVESGGGLVQPGGSLRLSCAASGFNSGSYTMGWFRQAPGKEREFVAYISSGTDTYYADSVKGRFTISADNSKNTAYLQMNSLKPEDTAVYYCAATERMHHSWGQGTLVTVSS

SEQ ID NO: 427 - protein, 117 aa, synthetic construct
EVQLVESGGGLVQPGGSLRLSCAASGLTFSSYAMGWFRQAPGKEREWVSAISSGGDGRSYYADSVKGRFTISADNSKNTAYLQMNSLKPEDTAVYYCAAYQRGWGDWGQGTLVTVSS

SEQ ID NO: 428 - protein, 116 aa, synthetic construct
EVQLVESGGGLVQPGGSLRLSCAASGDTFSIYAMGWFRQAPGKEREFVASISTSGVGTFYADSVKGRFTISADNSKNTAYLQMNSLKPEDTAVYYCATSGSGSPNWGQGTLVTVSS

SEQ ID NO: 429 - protein, 117 aa, synthetic construct
EVQLVESGGGLVQPGGSLRLSCAASGRTFSVKDMGWFRQAPGKEREFVAAIGGVTDYADSVKGRFTISADNSKNTAYLQMNSLKPEDTAVYYCAAIAYEEGVYRWDWGQGTLVTVSS

SEQ ID NO: 430 - protein, 116 aa, synthetic construct
EVQLVESGGGLVQPGGSLRLSCAASGIPFRSRTMGWFRQAPGKEREFVAGIWSGGYTYADSVKGRFTISADNSKNTAYLQMNSLKPEDTAVYYCAAVSSNTETFDWGQGTLVTVSS

SEQ ID NO: 431 - protein, 116 aa, synthetic construct
EVQLVESGGGLVQPGGSLRLSCAASGRSISDYTMGWFRQAPGKEREFVAGIWSGGYTYADSVKGRFTISADNSKNTAYLQMNSLKPEDTAVYYCAAVSSNSETFDWGQGTLVTVSS

SEQ ID NO: 432 - protein, 116 aa, synthetic construct
EVQLVESGGGLVQPGGSLRLSCAASGFSFADYAMGWFRQAPGKEREWVASITSTGSTGYADSVKGRFTISADNSKNTAYLQMNSLKPEDTAVYYCAGRWDIVGAIWGQGTLVTVSS

SEQ ID NO: 433 - protein, 115 aa, synthetic construct
EVQLVESGGGLVQPGGSLRLSCAASGFSFADYAMGWFRQAPGKEREFVAAITWNSGRTNYADSVKGRFTISADNSKNTAYLQMNSLKPEDTAVYYCAYSGIGTDWGQGTLVTVSS

SEQ ID NO: 434 - protein, 120 aa, synthetic construct
EVQLVESGGGLVQPGGSLRLSCAASGRTFSVITMGWFRQAPGKERELVASITYLGRTNYADSVKGRFTISADNSKNTAYLQMNSLKPEDTAVYYCAALALGTDQSSTFDWGQGTLVTVSS

SEQ ID NO: 435 - protein, 119 aa, synthetic construct
EVQLVESGGGLVQPGGSLRLSCAASGGTAYAMGWFRQAPGKEREWVASISTSGSTITPYADSVKGRFTISADNSKNTAYLQMNSLKPEDTAVYYCAAIAYEEGVYRWDWGQGTLVTVSS

SEQ ID NO: 436 - protein, 120 aa, synthetic construct
EVQLVESGGGLVQPGGSLRLSCAASGHAFISYPMGWFRQAPGKEREWVSIIFTNGEGTYYADSVKGRFTISADNSKNTAYLQMNSLKPEDTAVYYCARSIVGDSGVVDYWGQGTLVTVSS

SEQ ID NO: 437 - protein, 123 aa, synthetic construct
EVQLVESGGGLVQPGGSLRLSCAASGDISSIVAMGWFRQAPGKEREWVASISTSGSTITPYADSVKGRFTISADNSKNTAYLQMNSLKPEDTAVYYCAAKALLGMTNPAGYEWGQGTLVTVSS

SEQ ID NO: 438 - protein, 115 aa, synthetic construct
EVQLVESGGGLVQPGGSLRLSCAASGSFSIAAMGWFRQAPGKEREFVAVTRSGGSTAYADSVKGRFTISADNSKNTAYLQMNSLKPEDTAVYYCAALDITTAASWGQGTLVTVSS

SEQ ID NO: 439 - protein, 117 aa, synthetic construct
EVQLVESGGGLVQPGGSLRLSCAASGFTFSSKTMGWFRQAPGKEREFVAGIWSGGYTHYADSVKGRFTISADNSKNTAYLQMNSLKPEDTAVYYCAAVSSNTEIFDWGQGTLVTVSS

SEQ ID NO: 440 - protein, 121 aa, synthetic construct
EVQLVESGGGLVQPGGSLRLSCAASGNAFSSSVMGWFRQAPGKERELVAVIIDSRTTKYADSVKGRFTISADNSKNTAYLQMNSLKPEDTAVYYCAAVGGATTVTASEWDWGQGTLVTVSS

SEQ ID NO: 441 - protein, 113 aa, synthetic construct
EVQLVESGGGLVQPGGSLRLSCAASGFRFGDYPMGWFRQAPGKEREGVAAMFTGTGSRTYYADSVKGRFTISADNSKNTAYLQMNSLKPEDTAVYYCAIPGVWGQGTLVTVSS

SEQ ID NO: 442 - protein, 118 aa, synthetic construct
EVQLVESGGGLVQPGGSLRLSCAASGYTFRARAYVMGWFRQAPGKEREGVASISSGGTTAYADSVKGRFTISADNSKNTAYLQMNSLKPEDTAVYYCAGRWDIVGAIWGQGTLVTVSS

SEQ ID NO: 443 - protein, 116 aa, synthetic construct
EVQLVESGGGLVQPGGSLRLSCAASGGTAYAMGWFRQAPGKEREWVSSIGIAGTPTFYADSVKGRFTISADNSKNTAYLQMNSLKPEDTAVYYCAANYGGSVLYNWGQGTLVTVSS

SEQ ID NO: 444 - protein, 116 aa, synthetic construct
EVQLVESGGGLVQPGGSLRLSCAASGFTFSDYVMGWFRQAPGKEREFVARISSGGSTYYADSVKGRFTISADNSKNTAYLQMNSLKPEDTAVYYCAGRWLEIGAEWGQGTLVTVSS

SEQ ID NO: 445 - protein, 113 aa, synthetic construct
EVQLVESGGGLVQPGGSLRLSCAASGRTYAMGWFRQAPGKEREGVAAIYSGGITTYADSVKGRFTISADNSKNTAYLQMNSLKPEDTAVYYCAAFDGYSGSDWGQGTLVTVSS

SEQ ID NO: 446 - protein, 118 aa, synthetic construct
EVQLVESGGGLVQPGGSLRLSCAASGVTLDLYAMGWFRQAPGKEREWVSSIGIAGTPTFYADSVKGRFTISADNSKNTAYLQMNSLKPEDTAVYYCAANVGVTGSYEWGQGTLVTVSS

SEQ ID NO: 447 - protein, 121 aa, synthetic construct
EVQLVESGGGLVQPGGSLRLSCAASGRTFTTYSMGWFRQAPGKEREWVASISTSGSTITPYADSVKGRFTISADNSKNTAYLQMNSLKPEDTAVYYCAAIAYEEGVYRWDWGQGTLVTVSS

SEQ ID NO: 448 - protein, 118 aa, synthetic construct
EVQLVESGGGLVQPGGSLRLSCAASGRTISVYAMGWFRQAPGKEREWVSSIGIAGTPTFYADSVKGRFTISADNSKNTAYLQMNSLKPEDTAVYYCAAVSSNTETFDWGQGTLVTVSS

SEQ ID NO: 449 - protein, 120 aa, synthetic construct
EVQLVESGGGLVQPGGSLRLSCAASGLTAGTYAMGWFRQAPGKEREGVAAIDWDGSRTQYADSVKGRFTISADNSKNTAYLQMNSLKPEDTAVYYCAAIAYEEGVYRWDWGQGTLVTVSS

SEQ ID NO: 450 - protein, 115 aa, synthetic construct
EVQLVESGGGLVQPGGSLRLSCAASGLTFSTYPMGWFRQAPGKEREGVAAIYSGGITTYADSVKGRFTISADNSKNTAYLQMNSLKPEDTAVYYCVRGGDYGLDWGQGTLVTVSS

SEQ ID NO: 451 - protein, 116 aa, synthetic construct
EVQLVESGGGLVQPGGSLRLSCAASGRTLSVYAMGWFRQAPGKEREWVSSIGIAGTPTFYADSVKGRFTISADNSKNTAYLQMNSLKPEDTAVYYCAAKTGTSFVWGQGTLVTVSS

SEQ ID NO: 452 - protein, 119 aa, synthetic construct
EVQLVESGGGLVQPGGSLRLSCAASGRTFSVITMGWFRQAPGKEREGVASIRNTGGSMYADSVKGRFTISADNSKNTAYLQMNSLKPEDTAVYYCAAIAHEEGVYRWDWGQGTLVTVSS

SEQ ID NO: 453 - protein, 121 aa, synthetic construct
EVQLVESGGGLVQPGGSLRLSCAASGGTFSSYAMGWFRQAPGKEREWVASISTSGSTITPYADSVKGRFTISADNSKNTAYLQMNSLKPEDTAVYYCAAIAYEEGVYRWDWGQGTLVTVSS

SEQ ID NO: 454 - protein, 113 aa, synthetic construct
EVQLVESGGGLVQPGGSLRLSCAASGRSFSNYVMGWFRQAPGKEREFLATIISDGNTRYADSVKGRFTISADNSKNTAYLQMNSLKPEDTAVYYCALGPGNYWGQGTLVTVSS

SEQ ID NO: 455 - protein, 118 aa, synthetic construct
EVQLVESGGGLVQPGGSLRLSCAASGRTLSVYAMGWFRQAPGKEREGIAAIYTGGVSSTTYADSVKGRFTISADNSKNTAYLQMNSLKPEDTAVYYCAAFDGYSGSDWGQGTLVTVSS

SEQ ID NO: 456 - protein, 118 aa, synthetic construct
EVQLVESGGGLVQPGGSLRLSCAASGFSFDDDYVMGWFRQAPGKERELVAAITSAGGRTNYADSVKGRFTISADNSKNTAYLQMNSLKPEDTAVYYCAGRWLEIGAEWGQGTLVTVSS

SEQ ID NO: 457 - protein, 113 aa, synthetic construct
EVQLVESGGGLVQPGGSLRLSCAASGDYYAMGWFRQAPGKEREWVSSIGIAGTPTFYADSVKGRFTISADNSKNTAYLQMNSLKPEDTAVYYCAAKTGTSFVWGQGTLVTVSS

SEQ ID NO: 458 - protein, 115 aa, synthetic construct
EVQLVESGGGLVQPGGSLRLSCAASGGAFSGLVMGWFRQAPGKEREFVAAINYRGSTHYADSVKGRFTISADNSKNTAYLQMNSLKPEDTAVYYCAIPTENQPDWGQGTLVTVSS

SEQ ID NO: 459 - protein, 121 aa, synthetic construct
EVQLVESGGGLVQPGGSLRLSCAASGRTFSMYAMGWFRQAPGKEREWVASISTSGSTITPYADSVKGRFTISADNSKNTAYLQMNSLKPEDTAVYYCAAIAHEEGVYRWDWGQGTLVTVSS

SEQ ID NO: 460 - protein, 116 aa, synthetic construct
EVQLVESGGGLVQPGGSLRLSCAASGFSFGDYVMGWFRQAPGKEREFVASISSGSAINYADSVKGRFTISADNSKNTAYLQMNSLKPEDTAVYYCAGRWLEIGAEWGQGTLVTVSS

SEQ ID NO: 461 - protein, 119 aa, synthetic construct
EVQLVESGGGLVQPGGSLRLSCAASGRTSNIYAMGWFRQAPGKEREWVASIASGASAIYADSVKGRFTISADNSKNTAYLQMNSLKPEDTAVYYCAAGSHSDYAPDYDWGQGTLVTVSS

SEQ ID NO: 462 - protein, 118 aa, synthetic construct
EVQLVESGGGLVQPGGSLRLSCAASGYTYIMGWFRQAPGKEREFVAGISQSGVGTAYADSVKGRFTISADNSKNTAYLQMNSLKPEDTAVYYCATYGSGSYYDAFDIWGQGTLVTVSS

SEQ ID NO: 463 - protein, 120 aa, synthetic construct
EVQLVESGGGLVQPGGSLRLSCAASGIPSIHAMGWFRQAPGKEREWVSSIGIAGTPTFYADSVKGRFTISADNSKNTAYLQMNSLKPEDTAVYYCAFITTNSDYDLGRRWGQGTLVTVSS

SEQ ID NO: 464 - protein, 116 aa, synthetic construct
EVQLVESGGGLVQPGGSLRLSCAASGFTLAYYAMGWFRQAPGKEREFVGGITLGGSTTYADSVKGRFTISADNSKNTAYLQMNSLKPEDTAVYYCAVVDQLRGKLWGQGTLVTVSS

SEQ ID NO: 465 - protein, 117 aa, synthetic construct
EVQLVESGGGLVQPGGSLRLSCAASGSFSIAAMGWFRQAPGKEREWVSSIGIAGTPTFYADSVKGRFTISADNSKNTAYLQMNSLKPEDTAVYYCAAGDTGGAAYGWGQGTLVTVSS

SEQ ID NO: 466 - protein, 123 aa, synthetic construct
EVQLVESGGGLVQPGGSLRLSCAASGSIFSISVMGWFRQAPGKEREWVSSISAGGYSTTYADSVKGRFTISADNSKNTAYLQMNSLKPEDTAVYYCAARIRGKVTVDNFDYAWGQGTLVTVSS

SEQ ID NO: 467 - protein, 116 aa, synthetic construct
EVQLVESGGGLVQPGGSLRLSCAASGRTFGSYAMGWFRQAPGKERELVAAISPAAVTTYYADSVKGRFTISADNSKNTAYLQMNSLKPEDTAVYYCAAYQRGWGDWGQGTLVTVSS

SEQ ID NO: 468 - protein, 124 aa, synthetic construct
EVQLVESGGGLVQPGGSLRLSCAASGGSLSNYVMGWFRQAPGKEREGVAAIYTGGGTTMYADSVKGRFTISADNSKNTAYLQMNSLKPEDTAVYYCAARPVRVDDISLPVGFDWGQGTLVTVSS

SEQ ID NO: 469 - protein, 120 aa, synthetic construct
EVQLVESGGGLVQPGGSLRLSCAASGTIFASAMGWFRQAPGKEREFVADIRMMLGSTTYADSVKGRFTISADNSKNTAYLQMNSLKPEDTAVYYCARAGITVSGTLGVSWGQGTLVTVSS

SEQ ID NO: 470 - protein, 122 aa, synthetic construct
EVQLVESGGGLVQPGGSLRLSCAASGFTFSNAVMGWFRQAPGKEREFVGGITLGGSTTYADSVKGRFTISADNSKNTAYLQMNSLKPEDTAVYYCAASAIGSGALRRFEYDWGQGTLVTVSS

SEQ ID NO: 471 - protein, 116 aa, synthetic construct
EVQLVESGGGLVQPGGSLRLSCAASGDTYSSAAMGWFRQAPGKEREGVASITSSGTAIYADSVKGRFTISADNSKNTAYLQMNSLKPEDTAVYYCAALDITTAASWGQGTLVTVSS

SEQ ID NO: 472 - protein, 116 aa, synthetic construct
EVQLVESGGGLVQPGGSLRLSCAASGFTFGDYAMGWFRQAPGKEREWVASITSGGNTNYADSVKGRFTISADNSKNTAYLQMNSLKPEDTAVYYCAGRWLEIGAEWGQGTLVTVSS

SEQ ID NO: 473 - protein, 120 aa, synthetic construct
EVQLVESGGGLVQPGGSLRLSCAASGSTFSINAMGWFRQAPGKEREGVAGITPGGNTNYADSVKGRFTISADNSKNTAYLQMNSLKPEDTAVYYCAHRSIGPYGYFFDSWGQGTLVTVSS

SEQ ID NO: 474 - protein, 120 aa, synthetic construct
EVQLVESGGGLVQPGGSLRLSCAASGFTFSGNWMGWFRQAPGKERELVASISSFGSTYYADSVKGRFTISADNSKNTAYLQMNSLKPEDTAVYYCAHRSDSSGYYYLDYWGQGTLVTVSS

SEQ ID NO: 475 - protein, 120 aa, synthetic construct
EVQLVESGGGLVQPGGSLRLSCAASGGSFSVKDMGWFRQAPGKEREFVSSISGGGSNTVYADSVKGRFTISADNSKNTAYLQMNSLKPEDTAVYYCAAIAHEEGVYRWDWGQGTLVTVSS

SEQ ID NO: 476 - protein, 121 aa, synthetic construct
EVQLVESGGGLVQPGGSLRLSCAASGRTFGTYAMGWFRQAPGKEREWVASISTSGSTITPYADSVKGRFTISADNSKNTAYLQMNSLKPEDTAVYYCAAIAYEEGVYRWDWGQGTLVTVSS

SEQ ID NO: 477 - protein, 120 aa, synthetic construct
EVQLVESGGGLVQPGGSLRLSCAASGFSLDYYGMGWFRQAPGKEREGVATINWSGATYADSVKGRFTISADNSKNTAYLQMNSLKPEDTAVYYCAAVGGATTVTASEWDWGQGTLVTVSS

SEQ ID NO: 478 - protein, 117 aa, synthetic construct
EVQLVESGGGLVQPGGSLRLSCAASGGTFSLYSMGWFRQAPGKEREWVASISTSGSTITPYADSVKGRFTISADNSKNTAYLQMNSLKPEDTAVYYCAANYGGSLSWGQGTLVTVSS

SEQ ID NO: 479 - protein, 122 aa, synthetic construct
EVQLVESGGGLVQPGGSLRLSCAASGSISSIGAMGWFRQAPGKEREWVSSIGIAGTPTFYADSVKGRFTISADNSKNTAYLQMNSLKPEDTAVYYCAARLTMATPNQSQYYWGQGTLVTVSS

SEQ ID NO: 480 - protein, 120 aa, synthetic construct
EVQLVESGGGLVQPGGSLRLSCAASGFTLNDYAMGWFRQAPGKEREEVAAISWIIGSTYYADSVKGRFTISADNSKNTAYLQMNSLKPEDTAVYYCAAIAHEEGVYRWDWGQGTLVTVSS

SEQ ID NO: 481 - protein, 116 aa, synthetic construct
EVQLVESGGGLVQPGGSLRLSCAASGYTFRNYAMGWFRQAPGKEREFVAAISRDGDRTYYADSVKGRFTISADNSKNTAYLQMNSLKPEDTAVYYCAAYQRGWGDWGQGTLVTVSS

SEQ ID NO: 482 - protein, 116 aa, synthetic construct
EVQLVESGGGLVQPGGSLRLSCAASGRTSNIYAMGWFRQAPGKEREWVSSISTGGGGTYYADSVKGRFTISADNSKNTAYLQMNSLKPEDTAVYYCAMNRAGIYEWGQGTLVTVSS

SEQ ID NO: 483 - protein, 118 aa, synthetic construct
EVQLVESGGGLVQPGGSLRLSCAASGGTFSGRGMGWFRQAPGKEREWVSTINSGGGTDYADSVKGRFTISADNSKNTAYLQMNSLKPEDTAVYYCALRRLSPPPLLDWGQGTLVTVSS

SEQ ID NO: 484 - protein, 124 aa, synthetic construct
EVQLVESGGGLVQPGGSLRLSCAASGHTSDTYIMGWFRQAPGKERERVAAISWSTGSTYYADSVKGRFTISADNSKNTAYLQMNSLKPEDTAVYYCAADMLPSDLSHGYYYRDWGQGTLVTVSS

SEQ ID NO: 485 - protein, 115 aa, synthetic construct
EVQLVESGGGLVQPGGSLRLSCAASGRTSNIYAMGWFRQAPGKEREWVSSGIAGTPTFYADSVKGRFTISADNSKNTAYLQMNSLKPEDTAVYYCAAKTGTPFVWGQGTLVTVSS

SEQ ID NO: 486 - protein, 124 aa, synthetic construct
EVQLVESGGGLVQPGGSLRLSCAASGLTFGTYTMGWFRQAPGKEREFVAGINWESGSTDYADSVKGRFTISADNSKNTAYLQMNSLKPEDTAVYYCARSYCTADSCYSSWFDPWGQGTLVTVSS

SEQ ID NO: 487 - protein, 116 aa, synthetic construct
EVQLVESGGGLVQPGGSLRLSCAASGGTFNVYAMGWFRQAPGKEREWVSSIGIAGTPTFYADSVKGRFTISADNSKNTAYLQMNSLKPEDTAVYYCAAKTGTPFVWGQGTLVTVSS

SEQ ID NO: 488 - protein, 118 aa, synthetic construct
EVQLVESGGGLVQPGGSLRLSCAASGRRFSAYGMGWFRQAPGKEREWVSGINRDGSTFYADSVKGRFTISADNSKNTAYLQMNSLKPEDTAVYYCALRRLSPPPLLDWGQGTLVTVSS

SEQ ID NO: 489 - protein, 120 aa, synthetic construct
EVQLVESGGGLVQPGGSLRLSCAASGSIYSLIAMGWFRQAPGKEREGVSSISSSDGRTYYADSVKGRFTISADNSKNTAYLQMNSLKPEDTAVYYCAAIAYEEGVYRRDWGQGTLVTVSS

SEQ ID NO: 490 - protein, 121 aa, synthetic construct
EVQLLESGGGLVQPGGSLRLSCAASGFTFSSYFMSWVRQAPGKGLEWVSAISREGRATYYADSVKGRFTISRDNSKNTLYLQMNSLRAEDTAVYYCARIRVGPSGGAFDYWGQGTLVTVSS

SEQ ID NO: 491 - protein, 116 aa, synthetic construct
EVQLLESGGGLVQPGGSLRLSCAASGFTFSNYGVSWVRQAPGKGLEWVSAISGNGGSTFYADSVKGRFTISRDNSKNTLYLQMNSLRAEDTAVYYCAKGLGRFDYWGQGTLVTVSS

SEQ ID NO: 492 - protein, 115 aa, synthetic construct
EVQLLESGGGLVQPGGSLRLSCAASGFTFKDYGMNWVRQAPGKGLEWVSGITRSGSTNYRDSVKGRFTISRDNSKNTLYLQMNSLRAEDTAVYYCAKGARRFDYWGQGTLVTVSS

SEQ ID NO: 493 - protein, 120 aa, synthetic construct
EVQLLESGGGLVQPGGSLRLSCAASGFTFGNYAMAWVRQAPGKGLEWVSGITRSGSTNYRDSVKGRFTISRDNSKNTLYLQMNSLRAEDTAVYYCARDRYFRQQNAFDYWGQGTLVTVSS

SEQ ID NO: 494 - protein, 113 aa, synthetic construct
EVQLLESGGGLVQPGGSLRLSCAASGFTFAKYKMWWVRQAPGKGLEWVSGITRSGSTNYRDSVKGRFTISRDNSKNTLYLQMNSLRAEDTAVYYCASLSRGYWGQGTLVTVSS

SEQ ID NO: 495 - protein, 112 aa, synthetic construct
EVQLLESGGGLVQPGGSLRLSCAASGFTFSRYFMGWVRQAPGKGLEWVSGSGGSTYYADSVKGRFTISRDNSKNTLYLQMNSLRAEDTAVYYCARGWDLDYWGQGTLVTVSS

SEQ ID NO: 496 - protein, 116 aa, synthetic construct
EVQLLESGGGLVQPGGSLRLSCAASGFTFSNYGMSWVRQAPGKGLEWVSGIAHNGRNTYYADSVKGRFTISRDNSKNTLYLQMNSLRAEDTAVYYCAKGLRRFDYWGQGTLVTVSS

SEQ ID NO: 497 - protein, 115 aa, synthetic construct
EVQLLESGGGLVQPGGSLRLSCAASGFTFHKYGMAWVRQAPGKGLEWVSGITRSGSTNYRDSVKGRFTISRDNSKNTLYLQMNSLRAEDTAVYYCAKGLRAFDYWGQGTLVTVSS

SEQ ID NO: 498 - protein, 122 aa, synthetic construct
EVQLLESGGGLVQPGGSLRLSCAASGFTFGDHGMGWVRQAPGKGLEWVSQISETGRRTYYADSVKGRFTISRDNSKNTLYLQMNSLRAEDTAVYYCAKDKRYRGSQHYFDYWGQGTLVTVSS

SEQ ID NO: 499 - protein, 117 aa, synthetic construct
EVQLLESGGGLVQPGGSLRLSCAASGFTFSKYQMTWVRQAPGKGLEWVGYISNSGSTSYNDSVKGRFTISRDNSKNTLYLQMNSLRAEDTAVYYCAKSPKVSLFDYWGQGTLVTVSS

SEQ ID NO: 500 - protein, 118 aa, synthetic construct
EVQLLESGGGLVQPGGSLRLSCAASGYSISSGYHWAWVRQAPGKGLEWVSSISGSSGTTYYADSVKGRFTISRDNSKNTLYLQMNSLRAEDTAVYYCAKGPGTRGDYWGQGTLVTVSS

SEQ ID NO: 501 - protein, 121 aa, synthetic construct
EVQLLESGGGLVQPGGSLRLSCAASGFTFKSYGMHWVRQAPGKGLEWVSLIPHTGNPTYYADSVKGRFTISRDNSKNTLYLQMNSLRAEDTAVYYCARGGPRGNKYYFDYWGQGTLVTVSS

SEQ ID NO: 502 - protein, 116 aa, synthetic construct
EVQLLESGGGLVQPGGSLRLSCAASGFTFHKYGMAWVRQAPGKGLEWVSAITGSGGSTYYADSVKGRFTISRDNSKNTLYLQMNSLRAEDTAVYYCARSRWLLDYWGQGTLVTVSS

SEQ ID NO: 503 - protein, 120 aa, synthetic construct
EVQLLESGGGLVQPGGSLRLSCAASGFTFSRYAMNWVRQAPGKGLEWVSSISGSSGTTYYADSVKGRFTISRDNSKNTLYLQMNSLRAEDTAVYYCAKDRGAAAGAFDYWGQGTLVTVSS

SEQ ID NO: 504 - protein, 116 aa, synthetic construct
EVQLLESGGGLVQPGGSLRLSCAASGFTFSKYQMTWVRQAPGKGLEWVSGITRSGSTNYRDSVKGRFTISRDNSKNTLYLQMNSLRAEDTAVYYCAKGSLRHFDYWGQGTLVTVSS

SEQ ID NO: 505 - protein, 116 aa, synthetic construct
EVQLLESGGGLVQPGGSLRLSCAASGFTFKAYEMGWVRQAPGKGLEWVSSISGYGSTTYYADSVKGRFTISRDNSKNTLYLQMNSLRAEDTAVYYCAKAGRKFDYWGQGTLVTVSS

SEQ ID NO: 506 - protein, 117 aa, synthetic construct
EVQLLESGGGLVQPGGSLRLSCAASGFTFRSYTMGWVRQAPGKGLEWVSSIRGSSSSTYYADSVKGRFTISRDNSKNTLYLQMNSLRAEDTAVYYCAKGVRKGFDYWGQGTLVTVSS

SEQ ID NO: 507 - protein, 116 aa, synthetic construct
EVQLLESGGGLVQPGGSLRLSCAASGFTFSRYAMNWVRQAPGKGLEWVSSISGSSGTTYYADSVKGRFTISRDNSKNTLYLQMNSLRAEDTAVYYCAKSHKRFDYWGQGTLVTVSS

SEQ ID NO: 508 - protein, 114 aa, synthetic construct
EVQLLESGGGLVQPGGSLRLSCAASGFTFGNYRMTWVRQAPGKGLEWVSGITRSGSTNYRDSVKGRFTISRDNSKNTLYLQMNSLRAEDTAVYYCARGNYFDYWGQGTLVTVSS

SEQ ID NO: 509 - protein, 116 aa, synthetic construct
EVQLLESGGGLVQPGGSLRLSCAASGFTFSSAAMSWVRQAPGKGLEWVSSISGSSGTTYYADSVKGRFTISRDNSKNTLYLQMNSLRAEDTAVYYCAKGLRRFDYWGQGTLVTVSS

SEQ ID NO: 510 - protein, 117 aa, synthetic construct
EVQLLESGGGLVQPGGSLRLSCAASGFTFSRYAMNWVRQAPGKGLEWVSGISSGGDTYYVDSVKGRFTISRDNSKNTLYLQMNSLRAEDTAVYYCARHKGLQPLDYWGQGTLVTVSS

SEQ ID NO: 511 - protein, 116 aa, synthetic construct
EVQLLESGGGLVQPGGSLRLSCAASGFTFHKYGMAWVRQAPGKGLEWVSSISGYGSTTYYADSVKGRFTISRDNSKNTLYLQMNSLRAEDTAVYYCAKRGKQFDYWGQGTLVTVSS

SEQ ID NO: 512 - protein, 116 aa, synthetic construct
EVQLLESGGGLVQPGGSLRLSCAASGFTFSRYFMGWVRQAPGKGLEWVSSISNSGGSTYYADSVKGRFTISRDNSKNTLYLQMNSLRAEDTAVYYCAKAGRKFDYWGQGTLVTVSS

SEQ ID NO: 513 - protein, 117 aa, synthetic construct
EVQLLESGGGLVQPGGSLRLSCAASGFTFSRYGMHWVRQAPGKGLEWVSTINQAGLRTYYADSVKGRFTISRDNSKNTLYLQMNSLRAEDTAVYYCARSYGGGFDYWGQGTLVTVSS

SEQ ID NO: 514 - protein, 117 aa, synthetic construct
EVQLLESGGGLVQPGGSLRLSCAASGFTLSSYAMSWVRQAPGKGLEWVSTINQAGLRTYYADSVKGRFTISRDNSKNTLYLQMNSLRAEDTAVYYCAKRTRSKFDYWGQGTLVTVSS

SEQ ID NO: 515 - protein, 119 aa, synthetic construct
EVQLLESGGGLVQPGGSLRLSCAASGFTFNAYPMTWVRQAPGKGLEWVSAISGRGDNTYYADSVKGRFTISRDNSKNTLYLQMNSLRAEDTAVYYCARPPKRGPRFDYWGQGTLVTVSS

SEQ ID NO: 516 - protein, 117 aa, synthetic construct
EVQLLESGGGLVQPGGSLRLSCAASGFTFNHYGMGWVRQAPGKGLEWVSVIRPSGGITTYADSVKGRFTISRDNSKNTLYLQMNSLRAEDTAVYYCAKAYYGGFDYWGQGTLVTVSS

SEQ ID NO: 517 - protein, 116 aa, synthetic construct
EVQLLESGGGLVQPGGSLRLSCAASGFTFRRYVMGWVRQAPGKGLEWVSDIGASGSATSYADSVKGRFTISRDNSKNTLYLQMNSLRAEDTAVYYCAKGLRRFDYWGQGTLVTVSS

SEQ ID NO: 518 - protein, 117 aa, synthetic construct
EVQLLESGGGLVQPGGSLRLSCAASGFTFSKYQMTWVRQAPGKGLEWVSSIRGSSSSTYYADSVKGRFTISRDNSKNTLYLQMNSLRAEDTAVYYCARSYGGGFDYWGQGTLVTVSS

SEQ ID NO: 519 - protein, 116 aa, synthetic construct
EVQLLESGGGLVQPGGSLRLSCAASGFTFDRYRMMWVRQAPGKGLEWVSAISGRGDNTYYADSVKGRFTISRDNSKNTLYLQMNSLRAEDTAVYYCAKPGRLFDYWGQGTLVTVSS

SEQ ID NO: 520 - protein, 117 aa, synthetic construct
EVQLLESGGGLVQPGGSLRLSCAASGFTFAKYKMWWVRQAPGKGLEWVSSIDDRGRYTYYADSVKGRFTISRDNSKNTLYLQMNSLRAEDTAVYYCAKRTRSKFDYWGQGTLVTVSS

SEQ ID NO: 521 - protein, 115 aa, synthetic construct
EVQLLESGGGLVQPGGSLRLSCAASGFTFSRYAMNWVRQAPGKGPEWVGKINYAGNTDYNDSVKGRFTISRDNSKNTLYLQMNSLRAEDTAVYYCAKAGRKFDYWGQGTLVTVSS

SEQ ID NO: 522 - protein, 117 aa, synthetic construct
EVQLLESGGGLVQPGGSLRLSCAASGFTFPKYDMMWVRQAPGKGLEWVSSIRGSSSSTYYADSVKGRFTISRDNSKNTLYLQMNSLRAEDTAVYYCARAGRILFDYWGQGTLVTVSS

SEQ ID NO: 523 - protein, 115 aa, synthetic construct
EVQLLESGGGLVQPGGSLRLSCAASGFTFSRYAMNWVRQAPGKGLEWVSGITRSGSTNYRDSVKGRFTISRDNSKNTLYLQMNSLRAEDTAVYYCAKGTTRFDYWGQGTLVTVSS

SEQ ID NO: 524 - protein, 117 aa, synthetic construct
EVQLLESGGGLVQPGGSLRLSCAASGFTFNSYAMSWVRQAPGKGLEWVSGITRSGSTNYRDSVKGRFTISRDNSKNTLYLQMNSLRAEDTAVYYCAKAVRNFAFDYWGQGTLVTVSS

SEQ ID NO: 525 - protein, 119 aa, synthetic construct
EVQLLESGGGLVQPGGSLRLSCAASGFTFSVYSMNWVRQAPGKGLEWVSGITRSGSTNYRDSVKGRFTISRDNSKNTLYLQMNSLRAEDTAVYYCAKSGTRIKQGFDYWGQGTLVTVSS

SEQ ID NO: 526 - protein, 116 aa, synthetic construct
EVQLLESGGGLVQPGGSLRLSCAASGFTFHKYGMAWVRQAPGKGLEWVATISGGGINTYYPDSVKGRFTISRDNSKNTLYLQMNSLRAEDTAVYYCAKGTTRFDYWGQGTLVTVSS

SEQ ID NO: 527 - protein, 120 aa, synthetic construct
EVQLLESGGGLVQPGGSLRLSCAASGFTFSRYFMGWVRQAPGKGLEWVSSIRGSSSSTYYADSVKGRFTISRDNSKNTLYLQMNSLRAEDTAVYYCAKQKTSQSGAFDYWGQGTLVTVSS

SEQ ID NO: 528 - protein, 117 aa, synthetic construct
EVQLLESGGGLVQPGGSLRLSCAASGFTLSSYAMSWVRQAPGKGLEWVSSIGRHGGRTYYADSVKGRFTISRDNSKNTLYLQMNSLRAEDTAVYYCAKRTRSKFDYWGQGTLVTVSS

SEQ ID NO: 529 - protein, 114 aa, synthetic construct
EVQLLESGGGLVQPGGSLRLSCAASGFTFSRYAMNWVRQAPGKGLEWVGYISNSGSTSYNDSVKGRFTISRDNSKNTLYLQMNSLRAEDTAVYYCARGRLFDYWGQGTLVTVSS

SEQ ID NO: 530 - protein, 121 aa, synthetic construct
EVQLLESGGGLVQPGGSLRLSCAASGFTFDRYRMMWVRQAPGKGLEWVSSISGSSGTTYYADSVKGRFTISRDNSKNTLYLQMNSLRAEDTAVYYCARIRVGPSGGAFDYWGQGTLVTVSS

SEQ ID NO: 531 - protein, 118 aa, synthetic construct
EVQLLESGGGLVQPGGSLRLSCAASGFTFSGYIMAWVRQAPGKGLEWVSSISSTGFKTYYADSVKGRFTISRDNSKNTLYLQMNSLRAEDTAVYYCAKGNSRYVFDYWGQGTLVTVSS

SEQ ID NO: 532 - protein, 117 aa, synthetic construct
EVQLLESGGGLVQPGGSLRLSCAASGFTFSNYGMSWVRQAPGKGLEWVSSIRGSSSSTYYADSVKGRFTISRDNSKNTLYLQMNSLRAEDTAVYYCAKAYYGGFDYWGQGTLVTVSS

SEQ ID NO: 533 - protein, 116 aa, synthetic construct
EVQLLESGGGLVQPGGSLRLSCAASGFTFETYQMWWVRQAPGKGLEWVSSIHPKGYPTRYADSVKGRFTISRDNSKNTLYLQMNSLRAEDTAVYYCAKPGLKFDYWGQGTLVTVSS

SEQ ID NO: 534 - protein, 116 aa, synthetic construct
EVQLLESGGGLVQPGGSLRLSCAASGFTFSRYHMEWVRQAPGKGLEWVSAISGSGDKTYYADSVKGRFTISRDNSKNTLYLQMNSLRAEDTAVYYCAKGLRRFDYWGQGTLVTVSS

SEQ ID NO: 535 - protein, 118 aa, synthetic construct
EVQLLESGGGLVQPGGSLRLSCAASGFTFSKYQMTWVRQAPGKGLEWVSAITGSGGSTYYADSVKGRFTISRDNSKNTLYLQMNSLRAEDTAVYYCAKTSPRVPLDYWGQGTLVTVSS

SEQ ID NO: 536 - protein, 116 aa, synthetic construct
EVQLLESGGGLVQPGGSLRLSCAASGFTFRRYVMGWVRQAPGKGLEWVSSISGSSGTTYYADSVKGRFTISRDNSKNTLYLQMNSLRAEDTAMYYCAKSNGRFDYWGQGTLVTVSS

SEQ ID NO: 537 - protein, 115 aa, synthetic construct
EVQLLESGGGLVQPGGSLRLSCAASGFTFAHEPMVWVRQAPGKGLEWVSGITRSGSTNYRDSVKGRFTISRDNSKNTLYLQMNSLRAEDTAVYYCAKGARRFDYWGQGTLVTVSS

SEQ ID NO: 538 - protein, 119 aa, synthetic construct
EVQLLESGGGLVQPGGSLRLSCAASGFTFGTYYMGWVRQAPGKGLEWVSAISGSGDKTYYADSVKGRFTISRDNSKNTLYLQMNSLRAEDTAVYYCAKRLASRSHFDYWGQGTLVTVSS

SEQ ID NO: 539 - protein, 120 aa, synthetic construct
EVQLLESGGGLVQPGGSLRLSCAASGFTFEGYPMSWVRQAPGKGLEWVSQISETGRRTYYADSVKGRFTTSRDNSKNTLYLQMNSLRAEDTAVYYCAKGGGRPYNPFDYWGQGTLVTVSS

SEQ ID NO: 540 - protein, 117 aa, synthetic construct
EVQLLESGGGLVQPGGSLRLSCAASGFTFRRYVMGWVRQAPGKGLEWVSSISGSSGTTYYADSVKGRFTISRDNSKNTLYLQMNSLRAEDTAVYYCAKAYYGGFDYWGQGTLVTVSS

SEQ ID NO: 541 - protein, 116 aa, synthetic construct
EVQLLESGGGLVQPGGSLRLSCAASGFTFAKYKMWWVRQAPGKGLEWVSAISGSGDKTYYADSVKGRFTISRDNSKNTLYLQMNSLRAEDTAVYYCAKLGRRFDYWGQGTLVTVSS

SEQ ID NO: 542 - protein, 116 aa, synthetic construct
EVQLLESGGGLVQPGGSLRLSCAASGFTFDRYRMMWVRQAPGKGLEWVSAISGSGGNTYYADSVKGRFTISRDNSKNTLYLQMNSLRAEDTAVYYCAKGARRFDYWGQGTLVTVSS

SEQ ID NO: 543 - protein, 115 aa, synthetic construct
EVQLLESGGGLVQPGGSLRLSCAASGFTFRRYVMGWVRQAPGKGLEWVSGISSGGDTYYVDSVKGRFTISRDNSKNTLYLQMNSLRAEDTAVYYCAKAGRKFDYWGQGTLVTVSS

SEQ ID NO: 544 - protein, 114 aa, synthetic construct
EVQLLESGGGLVQPGGSLRLSCAASGFTFSNYGMSWVRQAPGKGLEWVSGITRSGSTNYRDSVKGRFTISRDNSKNTLYLQMNSLRAEDTAVYYCARGRLFDYWGQGTLVTVSS

SEQ ID NO: 545 - protein, 118 aa, synthetic construct
EVQLLESGGGLVQPGGSLRLSCAASGYSISSGYHWAWVRQAPGKGLEWVSSIGRHGGRTYYADSVKGRFTISRDNSKNTLYLQMNSLRAEDTAVYYCAKAYYGGFDYWGQGTLVTVSS

SEQ ID NO: 546 - protein, 118 aa, synthetic construct
EVQLLESGGGLVQPGGSLRLSCAASGFTLSSYAMSWVRQAPGKGLEWVSGITRSGSTNYRDSVKGRFTISRDNSKNTLYLQMNSLRAEDTAVYYCAKFPFTHGKFDYWGQGTLVTVSS

SEQ ID NO: 547 - protein, 119 aa, synthetic construct
EVQLLESGGGLVQPGGSLRLSCAASGFTFSSYFMSWVRQAPGKGLEWVSAISREGRATYYADSVKGRFTISRDNSKNTLYLQMNSLRAEDTAVYYCAKLPKRGPRFDYWGQGTLVTVSS

SEQ ID NO: 548 - protein, 119 aa, synthetic construct
EVQLLESGGGLVQPGGSLRLSCAASGFTFSNYGVSWVRQAPGKGLEWVSGITRSGSTNYRDSVKGRFTISRDNSKNTLYLQMNSLRAEDTAVYYCARGPYGRYAALDYWGQGTLVTVSS

SEQ ID NO: 549 - protein, 115 aa, synthetic construct
EVQLLESGGGLVQPGGSLRLSCAASGFTFSRYAMNWVRQAPGKGLEWVGKINYAGNTDYNDSVKGRFTISRDNSKNTLYLQMNSLRAEDTAVYYCARSKIAFDYWGQGTLVTVSS

SEQ ID NO: 550 - protein, 119 aa, synthetic construct
EVQLLESGGGLVQPGGSLRLSCAASGFTFSRYFMGWVRQAPGKGLEWVGYISNSGSTSYNDSVKGRFTISRDNSKNTLYLQMNSLRAEDTAVYYCARGPYGRYAALDYWGQGTLVTVSS

SEQ ID NO: 551 - protein, 117 aa, synthetic construct
EVQLLESGGGLVQPGGSLRLSCAASGFTFSDYDMSWVRQAPGKGLEWVSSISSTGFKTYYADSVKGRFTISRDNSKNTLYLQMNSLRAEDTAVYYCAKRTRSKFDYWGQGTLVTVSS

SEQ ID NO: 552 - protein, 115 aa, synthetic construct
EVQLLESGGGLVQPGGSLRLSCAASGFTFDRYRMMWVRQAPGKGLEWVSAISGSGGGTSYADSVKGRFTISRDNSKNTLYLQMNSLRAEDTAVYYCARGRLFDYWGQGTLVTVSS

SEQ ID NO: 553 - protein, 118 aa, synthetic construct
EVQLLESGGGLVQPGGSLRLSCAASGFTFSRYHIEWVRQAPGKGLEWVSAISGRGDNTYYADSVKGRFTISRDNSKNTLYLQMNSLRAEDTAVYYCARHKGLQPLDYWGQGTLVTVSS

SEQ ID NO: 554 - protein, 116 aa, synthetic construct
EVQLLESGGGLVQPGGSLRLSCAASGFTFSRYAMNWVRQAPGKGLEWVSAISGSGDKTYYADSVKGRFTISRDNSKNTLYLQMNSLRAEDTAVYYCAKGLRRFDYWGQGTLVTVSS

SEQ ID NO: 555 - protein, 122 aa, synthetic construct
EVQLLESGGGLVQPGGSLRLSCAASGFTFSNYGVSWVRQAPGKGLEWVSEISPSGKKKYYADSVKGRFTISRDNSKNTLYLQMNSLRAEDTAVYYCAKHSYPTRGRHLFDYWGQGTLVTVSS

SEQ ID NO: 556 - protein, 117 aa, synthetic construct
EVQLLESGGGLVQPGGSLRLSCAASGFTVDTYAMTWVRQAPGKGLEWVSSIGRHGGRTYYADSVKGRFTISRDNSKNTLYLQMNSLRAEDTAVYYCAKRTRSKFDYWGQGTLVTVSS

SEQ ID NO: 557 - protein, 115 aa, synthetic construct
EVQLLESGGGLVQPGGSLRLSCAASGFTFDRYRMTWVRQAPGKGLEWVSSIGANGAPTYYADSVKGRFTISRDNSKNTLYLQMNSLRAEDTAVYYCARGRLFDYWGQGTLVTVSS

SEQ ID NO: 558 - protein, 115 aa, synthetic construct
EVQLLESGGGLVQPGGSLRLSCAASGFTFSPRRMSWVRQAPGKGLEWVSAITGSGGSTYYADSVKGRFTISRDNSKNTLYLQMNSLRAEDTAVYYCARGRLFDYWGQGTLVTVSS

SEQ ID NO: 559 - protein, 117 aa, synthetic construct
EVQLLESGGGLVQPGGSLRLSCAASGFTFRRYVMGWVRQAPGKGLEWVSGIVSSGGLTGYADSVKGRFTISRDNSKNTLYLQMNSLRAEDTAVYYCARSYGGGFDYWGQGTLVTVSS

SEQ ID NO: 560 - protein, 118 aa, synthetic construct
EVQLLESGGGLVQPGGSLRLSCAASGFTFSNYGMSWVRQAPGKGLEWVSAISGSGDKTYYADSVKGRFTISRDNSKNTLYLQMNSLRAEDTAVYYCARRSYFRRFDYWGQGTLVTVSS

SEQ ID NO: 561 - protein, 115 aa, synthetic construct
EVQLLESGGGLVQPGGSLRLSCAASGFTFAKYKMWWVRQAPGKGLEWVSSISGSSGTTYYADSVKGRFTISRDNSKNTLYLQMNSLRAEDTAVYYCARGRLFDYWGQGTLVTVSS

SEQ ID NO: 562 - protein, 121 aa, synthetic construct
EVQLLESGGGLVQPGGSLRLSCAASGFTYHKYGMAWVRQAPGKGLEWVSYISPIGPRTYYADSVKGRFTISRDNSKNTLYLQMNSLRAEDTAVYYCAKVRYGWGAGAFDYWGQGTLVTVSS

SEQ ID NO: 563 - protein, 117 aa, synthetic construct
EVQLLESGGGLVQPGGSLRLSCAASGFTFSRYAMNWVRQAPGKGLEWVSAISGSGGNTYYADSVKGRFTISRDNSKNTLYLQMNSLRAEDTAVYYCARVWRNSLDYWGQGTLVTVSS

SEQ ID NO: 564 - protein, 116 aa, synthetic construct
EVQLLESGGGLVQPGGSLRLSCAASGFTLSSYAMSWVRQAPGKGLEWVSTINQAGLRTYYADSVKGRFTISRDNSKNTLYLQMNSLRAEDTAVYYCAKGARRFDYWGQGTLVTVSS

SEQ ID NO: 565 - protein, 116 aa, synthetic construct
EVQLLESGGGLVQPGGSLRLSCAASGFTFKAYPIMWVRQAPGKGLEWVSAISGSGDKTYYADSVKGRFTISRDNSKNTLYLQMNSLRAEDTAVYYCAKSNGRFDYWGQGTLVTVSS

SEQ ID NO: 566 - protein, 119 aa, synthetic construct
EVQLLESGGGLVQPGGSLRLSCAASGFTFSRYHMEWVRQAPGKGLEWVSEISPSGGYTYYADSVKGRFTISRDNSKNTLYLQMNSLRAEDTAVYYCARLPKRGPRFDYWGQGTLVTVSS

SEQ ID NO: 567 - protein, 117 aa, synthetic construct
EVQLLESGGGLVQPGGSLRLSCAASGFTFSNYGVSWVRQAPGKGLEWVSYISPIGPRTYYADSVKGRFTISRDNSKNTLYLQMNSLRAEDTAVYYCAKGVRKGFDYWGQGTLVTVSS

SEQ ID NO: 568 - protein, 119 aa, synthetic construct
EVQLLESGGGLVQPGGSLRLSCAASGFTFHKYGMAWVRQAPGKGLEWVSAISREGRATYYADSVKGRFTISRDNSKNTLYLQMNSLRAEDTAVYYCAKQASRNSPFDYWGQGTLVTVSS

SEQ ID NO: 569 - protein, 116 aa, synthetic construct
EVQLLESGGGLVQPGGSLRLSCAASGFTFEGYPMSWVRQAPGKGLEWVSSIRGSSSSTYYADSVKGRFTISRDNSKNTLYLQMNSLRAEDTAVYYCAKGLGRFDYWGQGTLVTVSS

SEQ ID NO: 570 - protein, 116 aa, synthetic construct
EVQLLESGGGLVQPGGSLRLSCAASGFTFDRYRMMWVRQAPGKGLEWVSAITGSGGSTYYADSVKGRFTISRDNSKNTLYLQMNSLRAEDTAVYYCAKGLRRFDYWGQGTLVTVSS

SEQ ID NO: 571 - protein, 116 aa, synthetic construct
EVQLLESGGGLVQPGGSLRLSCAASGFTFSRYFMGWVRQAPGKGLEWVSGITRSGSTNYRDSVKGRFTISRDNSKNTLYLQMNSLRAEDTAVYYCAKGPGTRGDYWGQGTLVTVSS

SEQ ID NO: 572 - protein, 120 aa, synthetic construct
EVQLLESGGGLVQPGGSLRLSCAASGFTFSNYGVSWVRQAPGKGLEWVSGIAHNGRNTYYADSVKGRFTISRDNSKNTLYLQMNSLRAEDTAVYYCAKDYYYGSGIFDYWGQGTLVTVSS

SEQ ID NO: 573 - protein, 118 aa, synthetic construct
EVQLLESGGGLVQPGGSLRLSCAASGFTFHKYGMAWVRQAPGKGLEWVSAISGSGDKTYYADSVKGRFTISRDNSKNTLYLQMNSLRAEDTAVYYCAKQNSRYRFDYWGQGTLVTVSS

SEQ ID NO: 574 - protein, 119 aa, synthetic construct
EVQLLESGGGLVQPGGSLRLSCAASGFTFRRYVMGWVRQAPGKGLEWVSSISGSSGTTYYADSVKGRFTISRDNSKNTLYLQMNSLRAEDTAVYYCARLIATLGTFDYWGQGTLVTVSS

SEQ ID NO: 575 - protein, 118 aa, synthetic construct
EVQLLESGGGLVQPGGSLRLSCAASGFTFNKYPMMWVRQAPGKGLEWVSLIEVQGDRTYYADSVKGRFTISRDNSKNTLYLQMNSLRAEDTAVYYCARGRVGYAFDYWGQGTLVTVSS

SEQ ID NO: 576 - protein, 115 aa, synthetic construct
EVQLLESGGGLVQPGGSLRLSCAASGFTFSNSYISWVRQAPGKGLEWVSGIYPSGGSTVYADSVKGRFTISRDNSKNTLYLQMNSLRAEDTAVYYCARGNYFDYWGQGTLVTVSS

SEQ ID NO: 577 - protein, 120 aa, synthetic construct
EVQLLESGGGLVQPGGSLRLSCAASGFTFSRYFMGWVRQAPGKGLEWVSAISREGRATYYADSVKGRFTISRDNSKNTLYLQMNSLRAEDTAVYYCAKISQFGSNAFDYWGQGTLVTVSS

SEQ ID NO: 578 - protein, 118 aa, synthetic construct
EVQLLESGGGLVQPGGSLRLSCAASGFTFSSYFMSWVRQAPGKGLEWVSDIDQVGHATYYADSVKGRFTISRDNSKNTLYLQMNSLRAEDTAVYYCARVAFSGSFDYWGQGTLVTVSS

SEQ ID NO: 579 - protein, 117 aa, synthetic construct
EVQLLESGGGLVQPGGSLRLSCAASGFTFSRYFMGWVRQAPGKGLEWVSAISREGRATYYADSVKGRFTISRDNSKNTLYLQMNSLRAEDTAVYYCAKFRGRGFDYWGQGTLVTVSS

SEQ ID NO: 580 - protein, 117 aa, synthetic construct
EVQLLESGGGLVQPGGSLRLSCAASGFTFSSYFMSWVRQAPGKGLEWVSAISREGRATYYADSVKGRFTISRDNSKNTLYLQMNSLRAEDTAVYYCAKFRGRGFDYWGQGTLVTVSS

SEQ ID NO: 581 - protein, 119 aa, synthetic construct
EVQLLESGGGLVQPGGSLRLSCAASGFTFSRYFMGWVRQAPGKGLEWVSAISREGRATYYADSVKGRFTISRDNSKNTLYLQMNSLRAEDTAVYYCAKVRPFWGTFDYWGQGTLVTVSS

SEQ ID NO: 582 - protein, 116 aa, synthetic construct
EVQLLESGGGLVQPGGSLRLSCAASGFTFGNYRMTWVRQAPGKGLEWVSAITGSGGSTYYADSVKGRFTISRDNSKNTLYLQMNSLRAEDTAVYYCAKGLRRFDYWGQGTLVTVSS

SEQ ID NO: 583 - protein, 121 aa, synthetic construct
EVQLLESGGGLVQPGGSLRLSCAASGFTFDRYRMMWVRQAPGKGLEWVSAISGRGDNTYYADSVKGRFTISRDNSKNTLYLQMNSLRAEDTAVYYCARIRVGPSGGAFDYWGQGTLVTVSS

SEQ ID NO: 584 - protein, 118 aa, synthetic construct
EVQLLESGGGLVQPGGSLRLSCAASGFTFSRYFMGWVRQAPGKGLEWVSAISREGRATYYADSVKGRFTISRDNSKNTLYLQMNSLRAEDTAVYYCARVAFSGSFDYWGQGTLVTVSS

SEQ ID NO: 585 - protein, 117 aa, synthetic construct; identical to SEQ ID NO: 580

SEQ ID NO: 586 - protein, 121 aa, synthetic construct
EVQLLESGGGLVQPGGSLRLSCAASGFTFSRYFMGWVRQAPGKGLEWVSAISREGRATYYADSVKGRFTISRDNSKNTLYLQMNSLRAEDTAVYYCARTATSGSRGYFDYWGQGTLVTVSS

SEQ ID NO: 587 - protein, 120 aa, synthetic construct
EVQLLESGGGLVQPGGSLRLSCAASGFTFPVYNMAWVRQAPGKGLEWVSAISREGRATYYADSVKGRFTISRDNSKNTLYLQMNSLRAEDTAVYYCARGPYGRYAALDYWGQGTLVTVSS

SEQ ID NO: 588 - protein, 117 aa, synthetic construct
EVQLLESGGGLVQPGGSLRLSCAASGFTFSKYQMTWVRQAPGKGLEWVSAITGSGGSTYYADSVKGRFTISRDNSKNTLYLQMNSLRAEDTAVYYCARVWRNSLDYWGQGTLVTVSS

SEQ ID NO: 589 - protein, 118 aa, synthetic construct; identical to SEQ ID NO: 584

SEQ ID NO: 590 - protein, 116 aa, synthetic construct
EVQLLESGGGLVQPGGSLRLSCAASGFTFSNYGMSWVRQAPGKGLEWVSSISGSSGTTYYADSVKGRFTISRDNSKNTLYLQMNSLRAEDTAVYYCAKGWRRFDYWGQGTLVTVSS

SEQ ID NO: 591 - protein, 115 aa, synthetic construct
EVQLLESGGGLVQPGGSLRLSCAASGFTFSRYAMNWVRQAPGKGLEWVGYINPSRGYTYYADSVKGRFTISRDNSKNTLYLQMNSLRAEDTAVYYCARGRLFDYWGQGTLVTVSS

SEQ ID NO: 592 - protein, 116 aa, synthetic construct
EVQLLESGGGLVQPGGSLRLSCAASGFTFTHYSMGWVRQAPGKGLEWVSGITRSGSTNYRDSVKGRFTISRDNSKNTLYLQMNSLRAEDTAVYYCAKAYYGGFDYWGQGTLVTVSS

SEQ ID NO: 593 - protein, 121 aa, synthetic construct; identical to SEQ ID NO: 586

SEQ ID NO: 594 - protein, 117 aa, synthetic construct
EVQLLESGGGLVQPGGSLRLSCAASGFTFSRYAMNWVRQAPGKGLEWVSSISGSSGTTYYADSVKGRFTISRDNSKNTLYLQMNSLRAEDTAVYYCAKGVRKGFDYWGQGTLVTVSS

SEQ ID NO: 595 - protein, 120 aa, synthetic construct
EVQLLESGGGLVQPGGSLRLSCAASGFTFEEKEMIWVRQAPGKGLEWVSGITRSGSTNYRDSVKGRFTISRDNSKNTLYLQMNSLRAEDTAVYYCARIRVGPSGGAFDYWGQGTLVTVSS

SEQ ID NO: 596 - protein, 115 aa, synthetic construct
EVQLLESGGGLVQPGGSLRLSCAASGFTFPVYNMAWVRQAPGKGLEWVSYITPKGDHYYADSVKGRFTISRDNSKNTLYLQMNSLRAEDTAVYYCAKAGRKFDYWGQGTLVTVSS

SEQ ID NO: 597 - protein, 115 aa, synthetic construct
EVQLLESGGGLVQPGGSLRLSCAASGFTFGNYAMAWVRQAPGKGLEWVSGITRSGSTNYRDSVKGRFTISRDNSKNTLYLQMNSLRAEDTAVYYCAKSGRRFDYWGQGTLVTVSS

SEQ ID NO: 598 - protein, 117 aa, synthetic construct
EVQLLESGGGLVQPGGSLRLSCAASGFTSNNFAMTWVRQAPGKGLEWVSIISPLGLSTYYADSVKGRFTISRDNSKNTLYLQMNSLRAEDTAVYYCARSYGGGFDYWGQGTLVTVSS

SEQ ID NO: 599 - protein, 115 aa, synthetic construct
EVQLLESGGGLVQPGGSLRLSCAATGFTFSRYAMNWVRQAPGKGLEWVSYITPKGDHTYYADSVKGRFTISRDNSKNTLYLQMNSLRAEDTAVYYCARGNYFDYWGQGTLVTVSS

SEQ ID NO: 600 - protein, 115 aa, synthetic construct
EVQLLESGGGLVQPGGFLRLSCAASGFTFRRYVMGWVRQAPGKGLEWVSSISGSSGTTYYADSVKGRFTISRDNSKNTLYLQMNSLRAEDTAVYYCARGNYFDYWGQGTLVTVSS

SEQ ID NO: 601 - protein, 116 aa, synthetic construct
EVQLLESGGGLVQPGGSLRLSCAASGFTFAHESMVWVRQAPGKGLEWVSSISGYGSTTYYADSVKGRFTISRDNSKNTLYLQMNSLRAEDTAVYYCVKNALRFDYWGQGTLVTVSS

SEQ ID NO: 602 - protein, 121 aa, synthetic construct
EVQLLESGGGLVQPGGSLRLSCAASGFTFSNYGVSWVRQAPGKGLEWVSEISPSGKKKYYADSVKGRFTISRDNSKNTLYLQMNSLRAEDTAVYYCARIRVGPSGGAFDYWGQGTLVTVSS

SEQ ID NO: 603 - protein, 116 aa, synthetic construct
EVQLLESGGGLVQPGGSLRLSCAASGFTFAHEPMVWVRQAPGKGLEWVSSISGSSGTTYYADSVKGRFTISRDNSKNTLYLQMNSLRAEDTAVYYCAKGLRRFDYWGQGTLVTVSS

SEQ ID NO: 604 - protein, 117 aa, synthetic construct
EVQLLESGGGLVQPGGSLRLSCAASGFTFSRYAMNWVRQAPGKGLEWVSEISPSGKKKYYADSVKGRFTISRDNSKNTLYLQMNSLRAEDTAVYYCAKRTRSKFDYWGQGTLVTVSS

SEQ ID NO: 605 - protein, 116 aa, synthetic construct
EVQLLESGGGLVQPGGSLRLSCAASGFTFSNSYISWVRQAPGKGLEWVSSIWPRGQKTYYADSVKGRFTISRDNSKNTLYLQMNSLRAEDTAVYYCAKAGRKFDYWGQGTLVTVSS

SEQ ID NO: 606 - protein, 116 aa, synthetic construct
EVQLLESGGGLVQPGGSLRLSCAASGFTFRSYTMGWVRQAPGKGLEWVSGITRSGSTNYRDSVKGRFTISRDNSKNTLYLQMNSLRAEDTAVYYCAKAYYGGFDYWGQGTLVTVSS

SEQ ID NO: 607 - protein, 118 aa, synthetic construct; identical to SEQ ID NO: 584

SEQ ID NO: 608 - protein, 115 aa, synthetic construct
EVQLLESGGGLVQPGGSLRLSCAASGFTFHKYGMAWVRQAPGKGLEWVSDIGASGSATSYADSVKGRFTISRDNSKNTLYLQMNSLRAEDTAVYYCARGRLFDYWGQGTLVTVSS

SEQ ID NO: 609 - protein, 119 aa, synthetic construct
EVQLLESGGGLVQPGGSLRLSCAASGFTFSRYFMGWVRQAPGKGLEWVSAISREGRATYYADSVKGRFTISRDNSKNTLYLQMNSLRAEDTAVYYCARIHSGSYYFDYWGQGTLVTVSS

SEQ ID NO: 610 - protein, 115 aa, synthetic construct
EVQLLESGGGLVQPGGSLRLSCAASGFTFSSYFMSWVRQAPGKGLEWVSAISGNGGSTFYADSVKGRFTISRDNSKNTLYLQMNSLRAEDTAVYYCARGRLFDYWGQGTLVTVSS

SEQ ID NO: 611 - protein, 118 aa, synthetic construct
EVQLLESGGGLVQPGGSLRLSCAASGFTSNNFAMTWVRQAPGKGLEWVSTINQAGLRTYYADSVKGRFTISRDNSKNTLYLQMNSLRAEDTAVYYCARGRVGYAFDYWGQGTLVTVSS

SEQ ID NO: 612 - protein, 119 aa, synthetic construct
EVQLLESGGGLVQPGGSLRLSCAASGFTFSRYFMGWVRQAPGKGLEWVSAISREGRATYYADSVKGRFTISRDNSKNTLYLQMNSLRAEDTAVYYCAKFRQYSGGFDYWGQGTLVTVSS

SEQ ID NO: 613 - protein, 116 aa, synthetic construct
EVQLLESGGGLVQPGGSLRLSCAASGFTFETYAMSWVRQAPGKGLEWVSSIGRHGGRTYYADSVKGRFTISRDNSKNTLYLQMNSLRAEDTAVYYCAKGLRRFDYWGQGTLVTVSS

SEQ ID NO: 614 - protein, 116 aa, synthetic construct
EVQLLESGGGLVQPGGSLRLSCAASGFTFSDYDIGWVRQAPGKGLEWVSTISPYGPVTYYADSVKGRFTISRDNSKNTLYLQMNSLRAEDTAVYYCAKSGRRLDYWGQGTLVTVSS

SEQ ID NO: 615 - protein, 115 aa, synthetic construct
EVQLLESGGGLVQPGGSLRLSCAASGFTFSRYAMSWVRQAPGKGLEWVSAISGNGGSTFYADSVKGRFTISRDNSKNTLYLQMNSLRAEDTAVYYCARGRLFDYWGQGTLVTVSS

SEQ ID NO: 616 - protein, 116 aa, synthetic construct
EVQLLESGGGLVQPGGSLRLSCAASGFTFPVYNMAWVRQAPGKGLEWVSGITRSGSTNYRDSVKGRFTISRDNSKNTLYLQMNSLRAEDTAVYYCARVWRNHLDYWGQGTLVTVSS

SEQ ID NO: 617 - protein, 115 aa, synthetic construct
EVQLLESGGGLVQPGGSLRLSCAASGFTFGTIPMSWVRQAPGKGLEWVSGITRSGSTNYRDSVKGRFTISRDNSKNTLYLQMNSLRADDTAVYYCAKGWRRFDYWGQGTLVTVSS

SEQ ID NO: 618 - protein, 121 aa, synthetic construct
EVQLLESGGGLVQPGGSLRLSCVASGFTFPVYNMAWVRQAPGKGLEWVSGIVSSGGLTGYADSVKGRFTISRDNSKNTLYLQMNSLRAEDTAVYYCAKGLRYSSAWTFDYWGQGTLVTVSS

SEQ ID NO: 619 - protein, 117 aa, synthetic construct; identical to SEQ ID NO: 580

SEQ ID NO: 620 - protein, 117 aa, synthetic construct
EVQLLESGGGLVQPGGSLRLSCAASGFTFDRYRMMWVRQAPGKGLEWVSSIWPRDQKTYYADSVKGRFTISRDNSKNTLYLQMNSLRAEDTAVYYCAKWSSRAFDYWGQGTLVTVSS

SEQ ID NO: 621 - protein, 115 aa, synthetic construct
EVQLLESGGGLVQPGGSLRLSCAASGFTFSNYGVSWVRQAPGKGLEWVSGITRSGSTNYRDSVKGRFTISRDNSKNTLYLQMNSLRAEDTAVYYCAKGLRRFDYWGQGTLVTVSS

SEQ ID NO: 622 - protein, 117 aa, synthetic construct
EVQLLESGGGLVQPGGSLRLSCAASGFTFGNYRMTWVRQAPGKGLEWVSSISGYGSTTYYADSVKGRFTISRDNSKNTLYLQMNSLRAEDTAVYYCAKGVRKGFDYWGQGTLVTVSS

SEQ ID NO: 623 - protein, 119 aa, synthetic construct
EVQLLESGGGLVQPGGSLRLSCAASGFTFSRYFMGWVRQAPGKGLEWVSAISREGRATYYADSVKGRFTISRDNSKNTLYLQMNSLRAEDTAVYYCARFQGYGGGFDYWGQGTLVTVSS

SEQ ID NO: 624 - protein, 116 aa, synthetic construct; identical to SEQ ID NO: 582

SEQ ID NO: 625 - protein, 117 aa, synthetic construct
EVQLLESGGGLVQPGGSLRLSCAASGFTFSNYGVSWVRQAPGKGLEWVSYIGPSGGKTYYADSVKGRFTISRDNSKNTLYLQMNSLRAEDTAVYYCAKGVRKGFDYWGQGTLVTVSS

SEQ ID NO: 626 - protein, 115 aa, synthetic construct
EVQLLESGGGLVQPGGSLRLSCAASGFTFRRYVMGWVRQAPGKGLEWVSSISGSSGTTYYADSVKGRFTISRDNSKNTLYLQMNSLRAEDTAVYYCARGRLFDYWGQGTLVTVSS

SEQ ID NO: 627 - protein, 118 aa, synthetic construct
EVQLLESGGGLVQPGGSLRLSCAASGFTFSVYSMNWVRQAPGKGLEWVSGITRSGSTYRDSVKGRFTISRDNSKNTLYLQMNSLRAEDTAVYYCAKSGTRIKQGFDYWGQGTLVTVSS

SEQ ID NO: 628 - protein, 116 aa, synthetic construct
EVQLLESGGGLVQPGGSLRLSCAASGFTFSRYAMNWVRQAPGKGLEWVSSISGSGDKTYYADSVKGRFTISRDNSKNTLYLQMNSLRAEDTAVYYCAKSGRRFDYWGQGTLVTVSS

SEQ ID NO: 629 - protein, 119 aa, synthetic construct
EVQLLESGGGLVQPGGSLRLSCAASGFTFSRYFMGWVRQAPGKGLEWVSAISREGRATYYADSVKGRFTISRDNSKNTLYLQMNSLRAEDTAVYYCARVIAAAGAFDYWGQGTLVTVSS

SEQ ID NO: 630 - protein, 115 aa, synthetic construct
EVQLLESGGGLVQPGGSLRLSCAASGFTFGNYRMTWVRQAPGKGLEWVSAIIGSGSNTYYADSVKGRFTISRDNSKNTLYLQMNSLRAEDTAVYYCARGRLFDYWGQGTLVTVSS

SEQ ID NO: 631 - protein, 115 aa, synthetic construct
EVQLLESGGGLVQPGGSLRLSCAASGFTFGNYRMTWVRQAPGKGLEWVSSISGYGSTTYYADSVKGRFTISRDNSKNTLYLQMNSLRAEDTAVYYCARGRLFDYWGQGTLVTVSS

SEQ ID NO: 632 - protein, 117 aa, synthetic construct
EVQLLESGGGLVQPGGSLRLSCAASGFTFDRYRMMWVRQAPGKGLEWVSAITGSGGSTYYADSVKGRFTISRDNSKNTLYLQMNSLRAEDTAVYYCARSYGGGFDYWGQGTLVTVSS

SEQ ID NO: 633 - protein, 117 aa, synthetic construct; identical to SEQ ID NO: 580

SEQ ID NO: 634 - protein, 117 aa, synthetic construct
EVQLLESGGGLVQPGGSLRLSCAASGFTFSSYFMSWVRQAPGKGLEWVSAISGSGDKTYYADSVKGRFTISRDNSKNTLYLQMNSLRAEDTAVYYCARAGRILFDYWGQGTLVTVSS

SEQ ID NO: 635 - protein, 116 aa, synthetic construct
EVQLLESGGGLVQPGGSLRLSCAASGFTFTHYSMGWVRQAPGKGLEWVSGITRSGSTNYRDSVKGRFTISRDNSKNTLYLQMNSLRAEDTAVYYCAKKLSNGFDYWGQGTLVTVSS

SEQ ID NO: 636 - protein, 123 aa, synthetic construct
EVQLLESGGGLVQPGGSLRLSCAASGFTFAKYKMWWVRQAPGKGLEWVSAISREGRATYYADSVKGRFTISRDNSKNTLYLQMNSLRAEDTAVYYCATRPSRGSSGWYGGDYRGQGTLVTVSS

SEQ ID NO: 637 - protein, 120 aa, synthetic construct
EVQLLESGGGLVQPGGSLRLSCAASGFTFSSYFMSWVRQAPGKGLEWVSAISREGRATYYADSVKGRFTISRDNSKNTLYLQMNSLRAEDTAVYYCAKISQFGSNAFDYWGQGTLVTVSS

SEQ ID NO: 638 - protein, 120 aa, synthetic construct
EVQLLESGGGLVQPGGSLRLSCAASGFTFNSYAMSWVRQAPGKGLEWVGYISNSGSTSYNDSVKGRFTISRDNSKNTLYLQMNSLRAEDTAVYYCARIRVGPSGGAFDYWGQGTLVTVSS

SEQ ID NO: 639 - protein, 114 aa, synthetic construct
EVQLLESGGGLVQPGGSLRLSCAASGFTFSNYGMSWVRQAPGKGLEWVGISNSGSTSYNDSVKGRFTISRDNSKNTLYLQMNSLRAEDTAVYYCAKNRAKFDYWGQGTLVTVSS

SEQ ID NO: 640 - protein, 116 aa, synthetic construct
EVQLLESGGGLVQPGGSLRLSCAASGFTFKSYGMHWVRQAPGKGLEWVSGITRSGSTNYRDSVKGRFTISRDNSKNTLYLQMNSLRAEDTAVYYCAKGPGTRGDYWGQGTLVTVSS

SEQ ID NO: 641 - protein, 117 aa, synthetic construct
EVQLLESGGGLVQPGGSLRLSCAASGFTFSRYFMGWVRQAPGKGLEWVSAISREGRATYYADSVKGRFTISRDNSKNTLYLQMNSLRAEDTAVYYCARVWRNHLDYWGQGTLVTVSS

SEQ ID NO: 642 - protein, 117 aa, synthetic construct
EVQLLESGGGLVQPGGSLRLSCAASGFTFSRYAMNWVRQAPGKGLEWVSSISGSSGTTYYADSVKGRFTISRDNSKNTLYLQMNSLRAEDTAVYYCARSYGGGFDYWGQGTLVTVSS

SEQ ID NO: 643 - protein, 116 aa, synthetic construct
EVQLLESGGGLVQPGGPLRLSCAASGFTFSRYAMNWVRQAPGKGLEWVSAITGSGGSTYYADSVKGRFTISRDNSKNTLYLQMNSLRAEDTAVYYCAKGLRAFDYWGQGTLVTVSS

SEQ ID NO: 644 - protein, 116 aa, synthetic construct
EVQLLESGGGLVQPGGSLRLSCAASGFTFRSYTMGWVRQAPGKGLEWVSSIHPKGYPTRYADSVKGRFTISRDNSKNTLYLQMNSLRAEDTAVYYCAKAGRKFDYWGQGTLVTVSS

SEQ ID NO: 645 - protein, 115 aa, synthetic construct
EVQLLESGGGLVQPGGSPRLSCAASGFTFKAYEMGWVRQAPGKGLEWVSGITRSGSTNYRDSVKGRFTISRDNSKNTLYLQMNSLRAEDTAVYYCAKSGRRFDYWGQGTLVTVSS

SEQ ID NO: 646 - protein, 116 aa, synthetic construct
EVQLLESGGGLVQPGGSLRLSCAASGFTFSSYFMSWVRQAPGKGLEWVSAISREGRATYYADSVKGRFTISRDNSKNTLYLQMNSLRAEDTAVYYCAKGLRRFDYWGQGTLVTVSS

SEQ ID NO: 647 - protein, 117 aa, synthetic construct
EVQLLESGGGLVQPGGSLRLSCAASGFTFHKYGMAWVRQAPGKGLEWVSSISGSSGTTYYADSVKGRFTISRDNSKNTLYLQMNSLRAEDTAVYYCARDLYRGFDYWGQGTLVTVSS

SEQ ID NO: 648 - protein, 117 aa, synthetic construct
EVQLLESGGGLVQPGGSLRLSCAASGFTFSRYFMGWVRQAPGKGLEWVSDISRLSPYTNYADSVKGRFTISRDNSKNTLYLQMNSLRAEDTAVYYCARSYGGGFDYWGQGTLVTVSS

SEQ ID NO: 649 - protein, 117 aa, synthetic construct
EVQLLESGGGLVQPGGSLRLSCAASGFTFSRYAMNWVRQAPGKGLEWVSGIYPSGGSTVYADSVKGRFTISRDNSKNTLYLQMNSLRAEDTAVYYCAKAYYGGFDYWGQGTLVTVSS

SEQ ID NO: 650 - protein, 121 aa, synthetic construct
EVQLLESGGGLVQPGGSLRLSCAASGFTFSSAAMSWVRQAPGKGLEWVSSIRGSSSSTYYADSVKGRFTISRDNSKNTLYLQMNSLRAEDTAVYYCARIRVGPSGGAFDYWGQGTLVTVSS

SEQ ID NO: 651 - protein, 116 aa, synthetic construct
EVQLLESGGGLVQPGGSLRLSCAASGFTFSRYAMNWVRQAPGKGLEWVSAISGSGDKTYYADSVKGRFTISRDNSKNTLYLQMNSLRAEDTAVYYCAKGLGRFDYWGQGTLVTVSS

SEQ ID NO: 652 - protein, 114 aa, synthetic construct
EVQLLESGGGLVQPGGSLRLSCAASGFTFNSYAMSWVRQAPGKGLEWVGISNSGSTSYNDSVKGRFTISRDNSKNTLYLQMNSLRAEDTAVYYCAKGLRRFDYWGQGTLVTVSS

SEQ ID NO: 653 - protein, 116 aa, synthetic construct
EVQLLESGGGLVQPGGSLRLSCAASGFTFHKYGMAWVRQAPGKGLEWVSSISGSSGTTYYADSVKGRFTISRDNSKNTLYLQMNSLRAEDTAVYYCAKAGRKFDYWGQGTLVTVSS

SEQ ID NO: 654 - protein, 115 aa, synthetic construct
EVQLLESGGGLVQPGGSLRLSCAASGFTLSSYAMSWVRQAPGKGLEWVSGITRSGSTNYRDSVKGRFTISRDNSKNTLYLQMNSLRAEDTAVYYCAKGLRRFDYWGQGTLVTVSS

SEQ ID NO: 655 - protein, 116 aa, synthetic construct
EVQLLESGGGLVQPGGSLRLSCAASGFTFSSAAMSWVRQAPGKGLEWVSAISREGRATYYADSVKGRFTISRDNSKNTLYLQMNSLRAEDTAVYYCAKGLRRFDYWGQGTLVTVSS

SEQ ID NO: 656 - protein, 115 aa, synthetic construct
EVQLLESGGGLVQPGGSLRLSCAASGFTFSPRRMSWVRQAPGKGLEWVSAISGSGGGTSYADSVKGRFTISRDNSKNTLYLQMNSLRAEDTAVYYCARGNYFDYWGQGTLVTVSS

SEQ ID NO: 657 - protein, 116 aa, synthetic construct
EVQLLESGGGLVQPGGSLRLSCAASGFTFGTIPMSWVRQAPGKGLEWVSAISGNGGSTFYADSVKGRFTISRDNSKNTLYLQMNSLRAEDTAVYYCAKGRRRFDYWGQGTLVTVSS

SEQ ID NO: 658 - protein, 122 aa, synthetic construct
EVQLLESGGGLVQPGGSLRLSCAASGFTFSSYFMSWVRQAPGKGLEWVSAISREGRATYYADSVKGRFTISRDNSKNTLYLQMNSLRAEDTAVYYCAKHSYPTRGRHLFDYWGQGTLVTVSS

SEQ ID NO: 659 - protein, 117 aa, synthetic construct
EVQLLESGGGLVQPGGSLRLSCAASGFTFRRYVMGWVRQAPGKGLEWVSSISGSSGTTYYADSVKGRFTISRDNSKNTLYLQMNSLRAEDTAVYYCARSYGGGFDYWGQGTLVTVSS

SEQ ID NO: 660 - protein, 116 aa, synthetic construct; identical to SEQ ID NO: 582

SEQ ID NO: 661 - protein, 116 aa, synthetic construct
EVQLLESGGGLVQPGGSLRLSCAASGFTFSNYGVSWVRQAPGKGLEWVSSISGYGSTTYYADSVKGRFTISRDNSKNTLYLQMNSLRAEDTAVYYCAKGLRRFDYWGQGTLVTVSS

SEQ ID NO: 662 - protein, 114 aa, synthetic construct
EVQLLESGGGLVQPGGSLRLSCAASGFTFRRYVMGWVRQAPGKGLEWVSGITRSGSTNYRDSVKGRFTISRDNSKNTLYLQMNSLRAEDTAVYYCARGRLFDYWGQGTLVTVSS

SEQ ID NO: 663 - protein, 121 aa, synthetic construct
EVQLLESGGGLVQPGGSLRLSCAASGFTFSRYAMNWVRQAPGKGLEWVSDIGASGSATSYADSVKGRFTISRDNSKNTLYLQMNSLRAEDTAVYYCARIRVGPSGGAFDYWGQGTLVTVSS

SEQ ID NO: 664 - protein, 116 aa, synthetic construct
EVQLLESGGGLVQPGGSLRLSCAASGFTFSRYAMNWVRQAPGKGLEWVSSISGSSGTTYYADSVKGRFTISRDNSKNTLYLQMNSLRAEDTAVYYCAKGWRRFDYWGQGTLVTVSS

SEQ ID NO: 665 - protein, 117 aa, synthetic construct
EVQLLESGGGLVQPGGSLRLSCAASGFTFHKYGMAWVRQAPGKGLEWVSAIEARGGGTYYADSVKGRFTISRDNSKNTLYLQMNSLRAEDTAVYYCAKAYYGGFDYWGQGTLVTVSS

SEQ ID NO: 666 - protein, 120 aa, synthetic construct
EVQLLESGGGLVQPGGSLRLSCAASGFTFSNSYISWVRQAPGKGLEWVSYITPKGDHTYYADSVKGRFTISRDNSKNTLYLQMNSLRAEDTAVYYCARGPYGRYAALDYWGQGTLVTVSS

SEQ ID NO: 667 - protein, 120 aa, synthetic construct
EVQLLESGGGLVQPGGSLRLSCAASGFTFSRYAMNWVRQAPGKGLEWVSAISGSGDKTYYADSVKGRFTISRDNSKNTLYLQMNSLRAEDTAVYYCAKGFRLFPRTFDYWGQGTLVTVSS

SEQ ID NO: 668 - protein, 117 aa, synthetic construct
EVQLLESGGGLVQPGGSLRLSCAASGFTFDRYRMMWVRQAPGKGLEWVSAISGRGDNTYYADSVKGRFTISRDNSKNTLYLQMNSLRAEDTAVYYCAKWFLKSFDYWGQGTLVTVSS

SEQ ID NO: 669 - protein, 121 aa, synthetic construct
EVQLLESGGGLVQPGGSLRLSCAASGFTFGSSAMSWVRQAPGKGLEWVSEIRVGGGDTYYADSVKGRFTISRDNSKNTLYLQMNSLRAEDTAVYYCARIRVGPSGGAFDYWGQGTLVTVSS

SEQ ID NO: 670 - protein, 116 aa, synthetic construct
EVQLLESGGGLVQPGGSLRLSCAASGFTFDRYRMMWVRQAPGKGLEWVGKINYAGNTDYNDSVKGRFTISRDNSKNTLYLQMNSLRAEDTAVYYCAKGWLGNFDYWGQGTLVTVSS

SEQ ID NO: 671 - protein, 115 aa, synthetic construct
EVQLLESGGGLVQPGGSLRLSCAASGFTFSSYFMSWVRQAPGKGLEWVGYINPSRGYTYYADSVKGRFTISRDNSKNTLYLQMNSLRAEDTAVYYCARGRLFDYWGQGTLVTVSS

SEQ ID NO: 672 - protein, 116 aa, synthetic construct
EVQLLESGGGLVQPGGSLRLSCAASGFTFGNYRMTWVRQAPGKGLEWVSAITGSGGSTYYADSVKGRFTISRDNSKNTLYLQMNSLRAEDTAVYYCAKGWRRFDYWGQGTLVTVSS

SEQ ID NO: 673 - protein, 116 aa, synthetic construct
EVQLLESGGGLVQPGGSLRLSCAASGFTFKSYGMHWVRQAPGKGLEWVSAITGSGGSTYYADSVKGRFTISRDNSKNTLYLQMNSLRAEDTAVYYCAKLGRRFDYWGQGTLVTVSS

SEQ ID NO: 674 - protein, 115 aa, synthetic construct
EVQLLESGGGLVQPGGSLRLSCAASGFTFGNYRMTWVRQAPGKGLEWVSAISGSGGNTYYADSVKGRFTISRDNSKNTLYLQMNSLRAEDTAVYYCARSVLLDYWGQGTLVTVSS

SEQ ID NO: 675 - protein, 125 aa, synthetic construct
EVQLLESGGGLVQPGGSLRLSCAASGFTFSNYATSWVRQAPGKGLEWVSSISGSGVDTYYADSVKGRFTISRDNSKNTLYLQMNSLRAEDTAVYYCARYRPGSYYNRGDVELDYWGQGTLVTVSS

SEQ ID NO: 676 - protein, 118 aa, synthetic construct
EVQLLESGGGLVQPGGSLRLSCAASGFAFSSYAMSWVRQAPGKGLELVSAISGSGDTSYYADSVKGRFTISRDNSKNTLYLQMNSLRAEDTAVYYCARVRRWSNFDYWGQGTLVTVSS

SEQ ID NO: 677 - protein, 116 aa, synthetic construct
EVQLLESGGGLVQPGGSLRLSCAASGFTFSNYAVNWVRQAPGKGLEWVSGISGSSGNTYYADSVKGRFTISRDNSKNTLYLQMNSLRAEDTAVYYCARGSRYSGYWGQGTLVTVSS

SEQ ID NO: 678 - protein, 123 aa, synthetic construct
EVQLLESGGGLVRPGGSLRLSCAASGFTFRNFAMSWVRQAPGKGLEWVSSISGSGDTTYYADSVKGRFTISRDNSKNTLYLQMNSLRAEDTAVYYCARHKRGRVAVAFPMDVWGQGTLVTVSS

SEQ ID NO: 679 - protein, 115 aa, synthetic construct
EVQLLESGGGLVQPGGSLRLSCAASGFTFGHYAMNWVRQAPGKGLEWVSGISGSGGRTYYADSVKGRFTISRDNSKNTLYLQMNSLRAEDTAVYYCARGRSQGDWGQGTLVTVSS

SEQ ID NO: 680 - protein, 120 aa, synthetic construct
EVQLLESGGGLVQPGGSLRLSCAASGFTFSSSAMSWVRQAPGKGLEWVSAISGSVGSTYYADSVKGRFTISRDNSKNTLYLQMNSLRAEDTAVYYCARVPKFRLGGLDVWGQGTLVTVSS

SEQ ID NO: 681 - protein, 125 aa, synthetic construct
EVQLLESGGGLVQPGGPLRLSCAASGFSFSKFAMSWVRQAPGKGLEWVSGISGSGGNTYYADSVKGRFTISRDNSKNTLYLQMNSLRAEDTAVYYCVKGSRGSYRSSTLGPFKHWGQGTLVTVSS

SEQ ID NO: 682 - protein, 123 aa, synthetic construct
EVQLLESGGGLVQPGGSLRLSCAASGFTSSNYAMTWVRQAPGKGLEWVSSIIGSGGGTYYADSVKGRFTISRDNSKNTLYLQMNSLRAEDTAVYYCARGIPRRKKGAGLFDYWGQGTLVTVSS

SEQ ID NO: 683 - protein, 117 aa, synthetic construct
EVQLLESGGGLVQPGGSLRLSCAASGFTFSRHAMNWVRQAPGKGLEWVSAISGSGGSTKYADSVKGRFTISRDNSKNTLYLQMNSLRAEDTAVYYCARRGVRGGEIWGQGTMVTVSS

SEQ ID NO: 684 - protein, 121 aa, synthetic construct
EVQLLESGGGLVQPGGSLRLSCAASGFTFPSYAMAWVRQAPGKGLEWVTAIRGSGGRTYYADSVKGRFTISRDNSKNTLYLQMNSLRAEDTAVYYCVKGRGRAPRLGFDYWGQGTLVTVSS

SEQ ID NO: 685 - protein, 121 aa, synthetic construct
EVQLLESGGGLVQPGGSLRLSCAASGFTFPSYAMAWVRQAPGKGLEWVSAIRGSGGRTYYADSVKGRFTISRDNSKNTLYLQMNSLRAEDTAVYYCVKGRGRAPRLGFDYWGQGTLVTVSS

SEQ ID NO: 686 - protein, 120 aa, synthetic construct
EVQLLESGGGLVQPGGSLRLSCAASGFTFNTFAMSWVRQAPGKGLELVSAISGSGGNTYYVDSVKGRFTISRDNSKNTLYLQMNSLRAEDTAVYYCARLGSGSSSSIDYWGQGTLVTVSS

SEQ ID NO: 687 - protein, 116 aa, synthetic construct
EVQLLESGGGLVQPGGSLRLSCAASGFTFGSSAMNWVRQAPGKGLEWVSSISGSGGNTFYADSVKGRFTISRDNSKNTLYLQMNSLRAEDTAVYYCARGRRKVDYWGQGTLVTVSS

SEQ ID NO: 688 - protein, 116 aa, synthetic construct
EVQLLESGGGLVQPGGSLRLSCAASGFTFNRYAMNWVRQAPGKGLEWVSTISASGGRTYYADSVKGRFTISRDNSKNTLYLQMNSLRAEDTAVYYCARGSLRLDTWGQGTLVTVSS

SEQ ID NO: 689 - protein, 129 aa, synthetic construct
EVQLLESGGGLVQPGGSLRLSCAASGFTFSRFAMSWVRQAPGKGLEWVSGISGSSGNTYYADSVKGRFTISRDNSKNTLYLQMNSLRAEDTAVYYCAREKRLPIRRRSGEPLGNYFDYWGQGTLVTVSS

SEQ ID NO: 690 - protein, 121 aa, synthetic construct
EVQLLESGGGLVQPGGSLRLSCAASGFTFPSYAMAWVRQAPGKGLEWVSAIRGSGGRTYYADSVKGRFTISRDNSKNTLYLQMNSLRAEDTAVYYCVKGRGRAPILGFDYWGQGTLVTVSS

SEQ ID NO: 691 - protein, 117 aa, synthetic construct
EVQLLESGGGLVQPGGSLRLSCAASGFSFSRYAMNWVRQAPGKGLEWVSGISGSGGRTNYADSVKGRFTISRDNSKNTLYLQMNSLRAEDTAVYYCARRRVGGFDNWGQGTLVTVSS

SEQ ID NO: 692 - protein, 122 aa, synthetic construct
EVQLLESGGGLVQPGGSLRLSCAASGFPFGSYAMSWVRQAPGKGLEWVTGISASGGRTYYADSVKGRFTISRDNSKNTLYLQMNSLRAEDTAVYYCARAPIRKGYTRGFDYWGQGTLVTVSS

SEQ ID NO: 693 - protein, 115 aa, synthetic construct
EVQLLESGGGLVQPGGSLRLSCAASGFTFRSYAMNWVRQAPGKGLEWVTGISGSGGRTYYADSVKGRFTISRDNSKNTLYLQMNSLRAEDTAVYYCARHRAFDIWGQGTLVTVSS

SEQ ID NO: 694 - protein, 119 aa, synthetic construct
EVQLLESGGGLVQPGGSLRLSCAASGFIFRSYAMSWVRQAPGKGLEWVSTISGSGGKTYYADSVKGRFTISRDNSKNTLYLQMNSLRAEDTAVYYCARGPLAGRSFDPWGQGTLVTVSS

SEQ ID NO: 695 - protein, 121 aa, synthetic construct
EVQLLESGGGLVQPGGSLRLSCAASGFTFSRYTMSWVRQAPGKGLEWVSTISGRGGSTYYADSVKGRFTISRDNSKNTLYLQMNSLRAEDTAVYYCARTRHYYGSRSSDYWGQGTLVTVSS

SEQ ID NO: 696 - protein, 128 aa, synthetic construct
EVQLLESGGGLVQPGGSLRLSCAASGFTYSSYAMTWVRQAPGKGLEWVSDISGSGSSTYYADSVKGRFTISRDNSKNTLYLQMNSLRAEDTAVYYCARDARATIFGVKRTRAYPLDVWGQGTLVTVSS

SEQ ID NO: 697 - protein, 119 aa, synthetic construct
EVQLLESGGGLVQPGGSLRLSCAASGFTFSNYAVNWVRQAPGKGLEWVSGISGSGAGTYYADSVKGRFTISRDNSKNTLYLQMNSLRAEDTAVYYCARHGYRRRDFDYWGQGTLVTVSS

SEQ ID NO: 698 - protein, 116 aa, synthetic construct
EVQLLESGGGLVQPGGSLRLSCAASGFTFSRYTMSWVRQAPGKGLEWVSTISGSGGRTYYADSVKGRFTISRDNSKNTLYLQMNSLRAEDTAVYYCARGRQQQTYWGQGTLVTVSS

SEQ ID NO: 699 - protein, 121 aa, synthetic construct
EVQLLESGGGLVQPGGSLRLSCAASGFTFSNYAINWVRQAPGKGLEWVSIISGSGGITYYADSVKGRFTISRDNSKNTLYLQMNSLRAEDTAVYYCARGPATAHFYSFDLWGQGTLVTVSS

SEQ ID NO: 700 - protein, 115 aa, synthetic construct
EVQLLESGGGLVQPGGSLRLSCAASGFTFNRFAMSWVRQAPGKGLEWVSGISASGSSTYYADSVKGRFTISRDNSKNTLYLQMNSLRAEDTAVYYCARKRIMDVWGQGTLVTVSS

SEQ ID NO: 701 - protein, 122 aa, synthetic construct
EVQLLESGGGLVQPGGSLRLSCAASGFSFSSYAMSWVRQAPGKGLEWVSAISGSGGGTSYADSVKGRFTISRDNSKNTLYLQMNSLRAEDTAVYYCAKGGPHCGGDCYIDHWGQGTLVTVSS

SEQ ID NO: 702 - protein, 116 aa, synthetic construct
EVQLLESGGGLVQPGGSLRLSCAASGFTFSRNTMSWVRQAPGKGLEWVSAISASGRSTYYADSVKGRFTISRDNSKNTLYLQMNSLRAEDTAVYYCARGNSALYNWGQGTLVTVSS

SEQ ID NO: 703 - protein, 117 aa, synthetic construct
EVQLLESGGGLVQPGGSLRLSCAASGFIFSRYAMSWVRQAPGKGLEWVSAISGAGGSTYYADSVKGRFTISRDNSKNTLYLQMNSLRAEDTAVYYCARVQRYTFDIWGQGTLVTVSS

SEQ ID NO: 704 - protein, 115 aa, synthetic construct
EVQLLESGGGLVQPGGSLRLSCAASGFTFSRYSMSWVRQAPGKGLEWVSGISGSGDRTYYADSVKGRFTISRDNSKNTLYLQMNSLRAEDTAVYYCARGRRFDPWGQGTLVTVSS

SEQ ID NO: 705 - protein, 123 aa, synthetic construct
EVQLLESGGGLVQPGGSLRLSCAASGFTFYNYAMSWVRQAPGKGLEWVSAISGSGSSTFYADSVKGRFTISRDNSKNTLYLQMNSLRAEDTAVYYCARLRADHSSATHYFDLWGQGTLVTVSS

SEQ ID NO: 706 - protein, 118 aa, synthetic construct
EVQLLESGGGLVQPGGSLRLSCAASGFTYSSYAMTWVRQAPGKGLEWVSDISGSGSSTYYADSVKGRFTISRDNSKNTLYLQMNSLRAEDTAVYYCARVRRWSNFDYWGQGTLVTVSS

SEQ ID NO: 707 - protein, 114 aa, synthetic construct
EVQLLESGGGLVQPGGSLRLSCAASGFTFRRYAMSWVRQAPGKGLEWVSGISGSSGNTYYADSVKGRFTISRDNSKNTLYLQMNSLRAEDTAVYYCVTGRGNIWGQGTLVTVSS

SEQ ID NO: 708 - protein, 120 aa, synthetic construct
EVQLLESGGGLVQPGGSLRLSCAASGFGFSSYAMSWVRQAPGKGLEWVSAISGSGGGTYYADSVKGRFTISRDNSKNTLYLQMNSLRAEDTAVYYCARVSRKMNYGINSWGQGTLVTVSS

SEQ ID NO: 709 - protein, 117 aa, synthetic construct
EVQLLESGGGLVQPGGSLRLSCAASGFTFGRYAMSWVRQAPGKGLEWVSAISGSGGNTFYADSVKGRFTISRDNSKNTLYLQMNSLRAEDTAVYYCSRGRYSSLDYWGQGTLVTVSS

SEQ ID NO: 710 - protein, 119 aa, synthetic construct
EVQLLESGGGLVQPGGSLRLSCAASGFTSRSYAMNWVRQAPGKGLEWVSAISGSGSNTFYADSVKGRFTISRDNSKNTLYLQMNSLRAEDTAVYYCARDWGRYAKFDHWGQGTLVTVSS

SEQ ID NO: 711 - protein, 119 aa, synthetic construct
EVQLLESGGGLVQPGGSLRLSCAASGFTFSRYAMSWVRQAPGKGLEWVSTISGSGGSAFYADSVKGRFTISRDNSKNTLYLQMNSLRAEDTAVYYCARARHRPHTFDQWGQGTLVTVSS

SEQ ID NO: 712 - protein, 122 aa, synthetic construct
EVQLLESGGGLVQPGGSLRLSCAASGFTFRNYAMGWVRQAPGKGLEWVSRISGSGGSTYYADSVKGRFTISRDNSKNTLYLQMNSLRAEDTAVYYCARGRGVAKAYWNFDLWGQGTLVTVSS

SEQ ID NO: 713 - protein, 119 aa, synthetic construct
EVQLLESGGGLVQPGGSLRLSCAASGFSFSSYAMSWVRQAPGKGLEWVSGISGSGGRTNYADSVKGRFTISRDNSKNTLYLQMNSLRAEDTAVYYCARGLGHSSTWTHWGQGTLVTVSS

SEQ ID NO: 714 - protein, 120 aa, synthetic construct
EVQLLESGGGLVQPGGSLRLSCAASGFSFSRYAMSWVRQAPGKGLEWVSTISGSVGSTYYADSVKGRFTISRDNSKNTLYLQMNSLRAEDTAVYYCAKGVGRVQGVMKDWGQGTLVTVSS

SEQ ID NO: 715 - protein, 118 aa, synthetic construct
EVQLLESGGGLVQPGGSLRLSCAASGFSFSDFAMSWVRQAPGKGLEWVSTFGGSGGSTYYADSVKGRFTISRDNSKNTLYLQMNSLRAEDTAVYYCARVRRWSNFDYWGQGTLVTVSS

SEQ ID NO: 716 - protein, 123 aa, synthetic construct
EVQLLESGGGLVQPGGSLRLSCAASGFTFRRYAMSWVRQAPGKGLEWVSGISGSGYSTYYADSVKGRFTISRDNSKNTLYLQMNSLRAEDTAVYYCARGYRYSYGRKGAFDIWGQGTLVTVSS

SEQ ID NO: 717 - protein, 122 aa, synthetic construct; identical to SEQ ID NO: 701

SEQ ID NO: 718 - protein, 121 aa, synthetic construct
EVQLLESGGGLVQPGGSLRLSCAASGFTFTTYGMSWVRQAPGKGLEWVSAIRGSGGSTYYADSVKGRFTISRDNSKNTLYLQMNSLRAEDTAVYYCAKDRTKGIAARFDYWGQGTLVTVSS

SEQ ID NO: 719 - protein, 121 aa, synthetic construct; identical to SEQ ID NO: 699

SEQ ID NO: 720 - protein, 119 aa, synthetic construct
EVQLLESGGGLVQPGGSLRLSCAASGFKFSDYAMSWVRQAPGKGLEWVSGISGSGGRTHYADSVKGRFTISRDNSKNTLYLQMNSLRAEDTAVYYCARNSRRARAFDIWGQGTLVTVSS

SEQ ID NO: 721 - protein, 117 aa, synthetic construct
EVQLLESGGGLVQPGGSLRLSCAASGFTFSRSSMSWVRQAPGKGLEWVSGISGSGGRTNYADSVKGRFTISRDNSKNTLYLQMNSLRAEDTAVYYCARGSRRGFDYWGQGTLVTVSS

SEQ ID NO: 722 - protein, 116 aa, synthetic construct
EVQLLESGGGLVQPGGSLRLSCAASGFTFGRYAMSWVRQAPGKGLEWVSGISGSGSSTYYADSVKGRFTISRDNSKNTLYLQMNSLRAEDTAVYYCARRRGSIDYWGQGTLVTVSS

SEQ ID NO: 723 - protein, 117 aa, synthetic construct
EVQLLESGGGLVQPGGSLRLSCAASGFSFSRYAMNWVRQAPGKGLEWVSGISSSGGGTYYADSVKGRFTISRDNSKNTLYLQMNSLRAEDTAVYYCARRNRGAMDVWGQGTLVTVSS

SEQ ID NO: 724 - protein, 124 aa, synthetic construct
EVQLLESGGGLVQPGGSLRLSCAASGFTFRNYGMSWVRQAPGKGLEWVSAISGRGGNTYYADSVKGRFTISRDNSKNTLYLQMNSLRAEDTAVYYCARRRFNSSHSPRGAFDVWGQGTLVTVSS

SEQ ID NO: 725 - protein, 116 aa, synthetic construct
EVQLLESGGGLVQPGGSLRLSCAASGFTYSNYAMSWVRQAPGKGLEWVSAISGSGGRTNYADSVKGRFTISRDNSKNTLYLQMNSLRAEDTAVYYCARGRSRFGYWGQGTLVTVSS

SEQ ID NO: 726 - protein, 125 aa, synthetic construct
EVQLLESGGGLVQPGGSLRLSCAASGITFSRYAMSWVRQAPGKGLEWVSAISGTGGNTYYADSVKGRFTISRDNSKNTLYLQMNSLRAEDTAVYYCARTKRTQTSRKPIYGMDVWGQGTLVTVSS

SEQ ID NO: 727 - protein, 116 aa, synthetic construct
EVQLLESGGGLVQPGGSLRLSCAASGFTFSRFAMSWVRQAPGKGLEWVSSISGSGGNTFYADSVKGRFTISRDNSKNTLYLQMNSLRAEDTAVYYCARGRRKVDYWGQGTLVTVSS

SEQ ID NO: 728 - protein, 126 aa, synthetic construct
EVQLLESGGGLVQPGGSLRLSCAASGFTFGPYAMAWVRQAPGKGLEWVSVISGGGGYTYYADSVKGRFTISRDNSKNTLYLQMNSLRAEDTAVYYCARDRSVSWSGYYVPDAFDIWGQGTLVTVSS

SEQ ID NO: 729 - protein, 122 aa, synthetic construct
EVQLLESGGGLVQPGGSLRLSCAASGLTFRTYAMSWVRQAPGKGLEWVSAISGSGRNTYYADSVKGRFTISRDNSKNTLYLQMNSLRAEDTAVYYCARAPYSGTRPGAFDFWGQGTLVTVSS

SEQ ID NO: 730 - protein, 121 aa, synthetic construct
EVQLLESGGGLVQPGGSLRLSCAASGFTFRSYSMAWVRQAPGKGLEWVSAISGRGSSTYYADSVKGRFTISRDNSKNTLYLQMNSLRAEDTAVYYCVRGDRSGWSEAFNMWGQGTLVTVSS

SEQ ID NO: 731 - protein, 117 aa, synthetic construct
EVQLLESGGGLVQPGGSLRLSCAASGFTFSKHAMSWVRQAPGKGLEWVSAISGSGGRTYYADSVKGRFTISRDNSKNTLYLQMNSLRAEDTAVYYCAKDHQDAFDIWGQGTLVTVSS

SEQ ID NO: 732 - protein, 122 aa, synthetic construct
EVQLLESGGGLVQPGGSLRLSCAASGFPFGSYAMSWVRQAPGKGLEWVSGISASGGRTYYADSVKGRFTISRDNSKNTLYLQMNSLRAEDTAVYYCARAPIRKGYTRGFDYWGQGTLVTVSS

SEQ ID NO: 733 - protein, 123 aa, synthetic construct
EVQLLESGGGLVQPGGPLRLSCAASGFTFITYAMNWVRQAPGKGLEWVSAISGRGGGTYYADSVKGRFTISRDNSKNTLYLQMNSLRAEDTAVYYCARPVDPSGSYYYAFDIWGQGTLVTVSS

SEQ ID NO: 734 - protein, 119 aa, synthetic construct
EVQLLESGGGLVQPGGSLRLSCAASGFTFTNYAMGWVRQAPGKGLEWVSGISISGGSTYYADSVKGRFTISRDNSKNTLYLQMNSLRAEDTAVYYCARWSGHRSSFDSWGQGTPVTVSS

SEQ ID NO: 735 - protein, 115 aa, synthetic construct
EVQLLESGGGLVQPGGSLRLSCAASGFTFGRYAMSWVRQAPGKGLEWVSAITGSGRSTYYADSVKGRFTISRDNSKNTLYLQMNSLRAGDTAVYYCARSRTMDVWGQGTLVTVSS

SEQ ID NO: 736 - protein, 116 aa, synthetic construct; identical to SEQ ID NO: 698

SEQ ID NO: 737 - protein, 119 aa, synthetic construct; identical to SEQ ID NO: 697

SEQ ID NO: 738 - protein, 115 aa, synthetic construct
EVQLLESGGGLVQPGGSLRLSCAASGFMFSRYAMSWVRQAPGKGLEWVSGISGSGGKTYYADSVKGRFTISRDNSKNTLYLQMNSLRAEDTAVYYCARGRRLDVWGQGTLVTVSS

SEQ ID NO: 739 - protein, 119 aa, synthetic construct
EVQLLESGGGLVQPGGSLRLSCAASGFRFSNYAMNWVRQAPGKGLEWVSGISGSGGRTYYADSVKGRFTISRDNSKNTLYLQMNSLRAEDTAVYYCARMMPRLRFFEYWGQGTLVTVSS

SEQ ID NO: 740 - protein, 119 aa, synthetic construct
EVQLLESGGGLVQPGGSLRLSCAASGFTFRSYAMTWVRQSPGKGLEWVSGISGGGGSAYYADSVKGRFTISRDNSKNTLYLQMNSLRAEDTAVYYCARARARSRSFDYWGQGTLVTVSS

SEQ ID NO: 741 - protein, 119 aa, synthetic construct
EVQLLESGGGLVQPGGSLRLSCAASGFTFSSYAMSWVRQAPGKGLEWVSGISGSGSSTFYADSVKGRFTISRDNSKNTLYLQMNSLRAEDTAVYYCARERRSLNWIDSWGQGTLVTVSS

SEQ ID NO: 742 - protein, 119 aa, synthetic construct
EVQLLESGGGLVQPGGSLRLSCAASGFSFSAYAMSWVRQAPGKGLEWVSVISGGGGATYYADSVKGRLTISRDNSKNTLYLQMNSLRAEDTAVYYCTTDPREPRFFDPWGQGTLVTVSS

SEQ ID NO: 743 - protein, 118 aa, synthetic construct
EVQLLESGGGLVQPGGSLRLSCAASGITFSRYAMSWVRQAPGKGLEWVSGISGSGGNTHYADSVKGRFTISRDNSKNTLYLQMNSLRAEDTAVYYCARDVRSGGRDVWGQGTLVTVSS

SEQ ID NO: 744 - protein, 120 aa, synthetic construct
EVQLLESGGGLVQPGGSLRLSCAASGFTFSRYAMAWVRQAPGKGLEWVSTISGSGTGTYYADSVKGRFTISRDNSKNTLYLQMNSLRAEDTAVYYCAKARTGVVGPINYWGQGTLVTVSS

SEQ ID NO: 745 - protein, 119 aa, synthetic construct
EVQLLESGGGLVQPGGSLRLSCAASGVTFRNYAMSWVRQAPGKGLEWVSTITGSGGSTYYADSVKGRFTISRDNSKNTLYLQMNSLRAEDTAVYYCAKDGRVRGVLDYWGQGTLVTVSS

SEQ ID NO: 746 - protein, 119 aa, synthetic construct
EVQLLESGGGLVQPGGSLRLSCAASGFTFNRYAMSWVRQAPGKGLEWVSSISGSGGNTFYADSVKGRFTISRDNSKNTLYLQMNSLRAEDTAVYYCAKRKVSTNAFDIWGQGTLVTVSS

SEQ ID NO: 747 - protein, 122 aa, synthetic construct
EVQLLESGGGLVQPGGSLRLSCAASGFTFKKYAMSWVRQAPGKGLEWVSAISGSGGNTYYADSVKGRFTISRDNTKNTLYLQMNSLRAEDTAVYYCARHRRGRTVAGPFDSWGQGTLVTVSS

SEQ ID NO: 748 - protein, 118 aa, synthetic construct
EVQLLESGGGLVQPGGSLRLSCAASGFTFGNFAMSWVRQAPGKGLEWVSAISGRGGSTYYADSVKGRFTISRDNSKNTLYLQMNSLRAEDTAVYYCARVRRWSNFDYWGQGTLVTVSS

SEQ ID NO: 749 - protein, 118 aa, synthetic construct
EVQLLESGGGLVQPGGSLRLSCAASGFAFSNYAMNWVRQAPGKGLEWVSAISGSGGTTFYADSVKGRFTISRDNSKNTLYLQMNSLRAEDTAVYYCARNRAGRRFDYWGQGTLVTVSS

SEQ ID NO: 750 - protein, 125 aa, synthetic construct
EVQLLESGGGLVQPGGSLRLSCAASGFTFSRHAMSWVRQAPGKGLEWVSGISGPGGSTYYADSVKGRFTISRDNSKNTLYLQMNSLRAEDTAVYYCARMRARLGRGVNARRFDQWGQGTLVTVSS

SEQ ID NO: 751 - protein, 118 aa, synthetic construct
EVQLLESGGGLVQPGGSLRLSCAASGFRFSNYAMNWVRQAPGKGPEWVSAISGRGGGASTYYADSVKGRFTISRDNSKNTLYLQMNSLRAEDTAVYYCARRYGSHDYWGQGTLVTVSS

SEQ ID NO: 752 - protein, 119 aa, synthetic construct
EVQLLESGGGLVQPGGSLRLSCAASGFRFSNYAMNWVRQAPGKGLEWVSAISGSGGTTYYADSVKGRFTISRDNSKNTLYLQMNSLRAEDTAVYYCARQRGAARPFDPWGQGTLVTVSS

SEQ ID NO: 753 - protein, 118 aa, synthetic construct
EVQLLESGGGLVQPGGSLRLSCAASGFAFSRHAMSWVRQAPGKGLEWVSGISGSGGRTFYADSVKGRFTISRDNSKNTLYLQMNSLRAEDTAVYYCAGHNARRTFGYWGQGTLVTVSS

SEQ ID NO: 754 - protein, 128 aa, synthetic construct; identical to SEQ ID NO: 696

SEQ ID NO: 755 - protein, 125 aa, synthetic construct
EVQLLESGGGLVQPGGSLRLSCAASGFTFSNRAMSWVRQAPGKGLEWVSAITGSGGSTYYADSVKGRFTISRDNSKNTLYLQMNSLRAEDTAVYYCVRDARTRGYYYGSGTYNLWGQGTLVTVSS

SEQ ID NO: 756 - protein, 123 aa, synthetic construct
EVQLLESGGGLVQPGGSLRLSCAASGFKFSSYAMTWVRQAPGKGLEWVSTISGSGSNTYYADSVKGRFTISRDNSKNTLYLQMNSLRAEDTAVYYCARGRSGFNYGQYYFDHWGQGTLVTVSS

SEQ ID NO: 757 - protein, 115 aa, synthetic construct
EVQLLESGGGLVQPGGSLRLSCAASGFTFTNYAMGWVRQAPGKGLEWVSGISGSGGSTYYTDSVKGRFTISRDNSKNTLYLQMNSLRAEDTAVYYCARGRRLDYWGQGTLVTVSS

SEQ ID NO: 758 - protein, 116 aa, synthetic construct
EVQLLESGGGLVQPGGSLRLSCATSGFTISSYAMNWVRQAPGKGLEWVSAVSGSGGRTYYADSVKGRFTISRDNSKNTLYLQMNSLRAEDTAVYYCARGRGWLRYWGQGTLVTVSS

SEQ ID NO: 759 - protein, 121 aa, synthetic construct; identical to SEQ ID NO: 699

SEQ ID NO: 760 - protein, 119 aa, synthetic construct
EVQLLESGGGLVQPGGSLRLSCAASGITFSRYAMSWVRQAPGKGLEWVSTISGTGGATYYADSVKGRFTISRDNSKNTLYLQMNSLRAEDTAVYYCARSGRFGYYFDSWGQGTLVTVSS

SEQ ID NO: 761 - protein, 121 aa, synthetic construct
EVQLLESGGGLVQPGGSLRLSCAASGLTVSSYAMSWVRQAPGKGLEWVSRISGSGGRTHYADSVKGRFTISRDNSKNTLYLQMNSLRAEDTAVYYCARAVAGTRGRAFDFWGQGTLVTVSS

SEQ ID NO: 762 - protein, 116 aa, synthetic construct
EVQLLESGGGLVQPGGSLRLSCAASGFAFRSYAMNWVRQAPGKGLEWVSAISGSAGRTYYADSVKGRFTISRDNSKNTLYLQMNSLRAEDTAVYYCARGRTRFDPWGQGTLVTVSS

SEQ ID NO: 763 - protein, 115 aa, synthetic construct; identical to SEQ ID NO: 700

SEQ ID NO: 764 - protein, 121 aa, synthetic construct
EVQLLESGGGLVQPGGSLRLSCAASGFPFSNYAMGWVRQAPGKGLEWVSSITGSGGRTYYADSVKGRFTISRDNSKNTLYLQMNSLRAEDTAVYYCARRGSTWSRGRFDPWGQGTLVTVSS

SEQ ID NO: 765 - protein, 119 aa, synthetic construct
EVQLLESGGGLVQPGGSLRLSCAASGFTFSHYAMPWVRQAPGKGLEWVSDISGSGATTYYADSVKGRFTISRDNSKNTLYLQMNSLRAEDTAVYYCTTDYTMAPTFDYWGQGTLVTVSS

SEQ ID NO: 766 - protein, 121 aa, synthetic construct
EVQLLESGGGLVQPGGSLRLSCAASGFPFSSYAMTWVRQAPGKGLEWVSAIRGSGGRTYYADSVKGRFTISRDNSKNTLYLQMNSLRAEDTAVYYCVKGRGRAPRLGFDYWGQGTLVTVSS

SEQ ID NO: 767 - protein, 121 aa, synthetic construct
EVQLLESGGGLVQPGGSLRLSCAASGFTFANYAMNWVRQAPGKGLEWVSTITGSGGATYYADSVKGRFTISRDNSKNTLYLQMNSLRAEDTAVYYCAKEGWKTNRGPLRNWGQGTLVTVSS

SEQ ID NO: 768 - protein, 121 aa, synthetic construct
EVQLLESGGGLVQPGGSLRLSCAASGFTFSNYAVSWVRQAPGKGLEWVSGISGTGGSTYYADSVKGRFTISRDNSKNTLYLQMNSLRAEDTAVYYCASRHASGTNYFMDVWGQGTLVTVSS

SEQ ID NO: 769 - protein, 117 aa, synthetic construct
EVQLLESGGGLVQPGGSLRLSCAASGFTFSNRAMSWVRQAPGKGLEWVSTIRGSGGSTYYADSVKGRFTISRDNSKNTLYLQMNSLRAEDTAVYYCARHMGSGWTPWGQGTLVTVSS

SEQ ID NO: 770 - protein, 122 aa, synthetic construct; identical to SEQ ID NO: 732

SEQ ID NO: 771 - protein, 120 aa, synthetic construct; identical to SEQ ID NO: 708

SEQ ID NO: 772 - protein, 123 aa, synthetic construct
EVQLLESGGGLVQPGGSLRLSCAASGFTFGNYAMNWVRQAPGKGLEWVSAISGTGGTTYYDSVKGRFTISRDNSKNTLYLQMNSLRAEDTAVYYCTTPNDYSNHNYYYGMDVWGQGTLVTVSS

SEQ ID NO: 773 - protein, 123 aa, synthetic construct
EVQLLESGGGLVQPGGSLRLSCAASGFTFSTYVMTWVRQAPGKGLEWVSGISASGGSTHYADSVKGRFTISRDNSKNTLYLQMNSLRAEDTAVYYCAKGMTALRNNWEPFDSWGQGTLVTVSS

SEQ ID NO: 774 - protein, 121 aa, synthetic construct; identical to SEQ ID NO: 699

SEQ ID NO: 775 - protein, 119 aa, synthetic construct
EVQLLESGGGLVQPGGSLRLSCAASGFAFSRYAMSWVRQAPGKGLEWVSLISGSGGRTYYADSVKGRFTISRDNSKNTLYLQMNSLRAEDTAVYYCARSRSRGPLLDYWGQGTLVTVSS

SEQ ID NO: 776 - protein, 121 aa, synthetic construct
EVQLLESGGGLVQPGGSLRLSCAASGFTISSYAMTWVRQAPGKGLEWVSAISGSGVSTDYADSVKGRFTISRDNSKNTLYLQMNSLRAEDTAVYYCARLSVARGAYGMDVWGQGTLVTVSS

SEQ ID NO: 777 - protein, 121 aa, synthetic construct
EVQLLESGGGLVQPGGSLRLSCAASGIHFSNYAMTWVRQAPGKGLEWVSGISGSGGYTYYADSVKGRFTISRDNSKNTLYLQMNSLRAEDTAVYYCARLRWGSVTRAFDIWGQGTLVTVSS

SEQ ID NO: 778 - protein, 119 aa, synthetic construct
EVQLLESGGGLVQPGGSLRLSCAASGFTFSRFAMTWVRQAPGKGLEWVSAISASGGDTYYADSVKGRFTISRDNSKNTLYLQMNSLRAEDTAVYYCATGSTSGRRFDYWGQGTLVTVSS

SEQ ID NO: 779 - protein, 123 aa, synthetic construct
EVQLLESGGGLVQPGGSLRLSCAASGFAFRSYAMSWVRQAPGKGLEWVSDISGSGGRTYYADSVKGRFTISRDNSKNTLYLQMNSLRAEDTAVYYCARVRRDGYRAYYYVDVWGQGTLVTVSS

SEQ ID NO: 780 - protein, 121 aa, synthetic construct
EVQLLESGGGLVQPGGSLRLSCAASGFTYSSYAMTWVRQAPGKGLEWVSAISASGVTTYYADSVKGRFTISRDNSKNTLYLQMNSLRAEDTAVYYCAREDSSGYDNWFDPWGQGTLVTVSS

SEQ ID NO: 781 - protein, 118 aa, synthetic construct
EVQLLESGGGLVQPGGSLRLSCAASGFSFSSYAMSWVRQAPGKGLEWVSAISGSGGGTSYADSVKGRFTISRDNSKNTLYLQMNSLRAEDTAVYYCARVRRWSNFDYWGQGTLVTVSS

SEQ ID NO: 782 - protein, 116 aa, synthetic construct
EVQLLESGGGLVQPGGSLRLSCAASGFRFSNYAMSWVRQAPGKGLEWVSTISGRGGSTNYADSVKGRFTISRDNSKNTLYLQMNSLRAEDTAVYYCARGWRSPGFWGQGTLVTVSS

SEQ ID NO: 783 - protein, 120 aa, synthetic construct
EVQLLESGGGLVQPGGSLRLSCAASGFTITNYAMSWVRQAPGKGLEWVSGIRGSGGSTYYADSVKGRFTISRDNSKNTLYLQMNSLRAEDTAVYYCARSGKYKGRAFDIWGQGTLVTVSS

SEQ ID NO: 784 - protein, 119 aa, synthetic construct
EVQLLESGGGLVQPGGSLRLSCAASGFTFRRSAMSWVRQAPGKGLEWVSGISGSGGSTHYADSVKGRFTISRDNSKNTLYLQMNSLRAEDTAVYYCARVRGLRGYFDFWGQGTLVTVSS

SEQ ID NO: 785 - protein, 119 aa, synthetic construct
EVQLLESGGGLVQPGGSLRLSCAASGFTFGRYAMSWVRQAPGKGLEWVSSVSGSGGSTYYADSVKGRFTISRDNSKNTLYLQMNSQRAEDTAVYYCARSRGRGAWFDHWGQGTLVTVSS

SEQ ID NO: 786 - protein, 116 aa, synthetic construct
EVQLLESGGGLVQPGGSLRLSCAASGFAFSSYAMSWVRQAPGKGLELVSAISGSGDTSYYADSVKGRFTISRDNSKNTLYLQMNSLRAEDTAVYYCARGRLWFRAWGQGTLVTVSS

SEQ ID NO: 787 - protein, 118 aa, synthetic construct
EVQLLESGGGLVQPGGSLRLSCAASGFRFSNYAMNWVRQAPGKGLEWVSSISGSGGGTYYADSVKGRFTISRDNSKNTLYLQMNSLRAEDTAVYYCARPSRGYGMDVWGQGTLVTVSS

SEQ ID NO: 788 - protein, 115 aa, synthetic construct
EVQLLESGGGLVQPGGSLRLSCAASGFTFKKYAMSWVRQAPGKGLEWVSSISGSAGSTYYADSVKGRFTISRDNSKNTLYLQMNSLRAEDTAVYYCAKGRGMDVWGQGTLVTVSS

SEQ ID NO: 789 - protein, 122 aa, synthetic construct; identical to SEQ ID NO: 701

SEQ ID NO: 790 - protein, 116 aa, synthetic construct
EVQLLESGGGLVQPGGSLRLSCAASGIHLSSYAMSWVRQAPGKGLEWVSAVTGSGGSTYYADSVKGRFTISRDNSKNTLYLQMNSLRAEDTAVYYCARASSYPDYWGQGTLVTVSS

SEQ ID NO: 791 - protein, 123 aa, synthetic construct; identical to SEQ ID NO: 310

SEQ ID NO: 792 - protein, 112 aa, synthetic construct
EVQLVESGGGLVQPGGSLRLSCAASGFTRSYYTMGWFRQAPGKERELVASITRGGGTTYADSVKGRFTISADNSKNTAYLQMNSLKPEDTAVYYCADVNGDWGQGTLVTVSS

SEQ ID NO: 793 - protein, 118 aa, synthetic construct
EVQLVESGGGLVQPGGSLRLSCAASGRTVSTMGWFRQAPGKEREWVSTITFNGDHTYYADSVKGRFTISADNSKNTAYLQMNSLKPEDTAVYYCAKAYSSSWPYFDYWGQGTLVTVSS

SEQ ID NO: 794 - protein, 122 aa, synthetic construct
EVQLVESGGGLVQPGGSLRLSCAASGFILREYNMGWFRQAPGKEREFVAAISPSAFTEYADSVKGRFTISADNSKNTAYLQMNSLKPEDTAVYYCAAANEYWVYVNPNRYTWGQGTLVTVSS

SEQ ID NO: 795 - protein, 112 aa, synthetic construct
EVQLVESGGGLVQPGGSLRLSCAASGRTFDSYDMGWFRQAPGKERELVASITYLGRTNYADSVKGRFTISADNSKNTAYLQMNSLKPEDTAVYYCADVNGDWGQGTLVTVSS

SEQ ID NO: 796 - protein, 115 aa, synthetic construct
EVQLVESGGGLVQPGGSLRLSCAASGGSFSGKDMGWFRQAPGKERELVATITYYADSVKGRFTISADNSKNTAYLQMNSLKPEDTAVYYCAKGADSSIFYAVDVWGQGTLVTVSS

SEQ ID NO: 797 - protein, 112 aa, synthetic construct
EVQLVESGGGLVQPGGSLRLSCAASGRTFSTYDMGWFRQAPGKERELVASITYLGRTNYADSVKGRFTISADNSKNTAYLQMNSLKPEDTAVYYCADINGDWGQGTLVTVSS

SEQ ID NO: 798 - protein, 123 aa, synthetic construct
EVQLVESGGGLVQPGGSLRLSCAASGFTYSSNYMGWFRQAPGKEREFVAGISWTDAYTEYADSVKGRFTISADNSKNTAYLQMNSLKPEDTAVYYCAAANEYWVYVNPNRYTWGQGTLVTVSS

SEQ ID NO: 799 - protein, 117 aa, synthetic construct; identical to SEQ ID NO: 388

SEQ ID NO: 800 - protein, 119 aa, synthetic construct
EVQLVESGGGLVQPGGSLRLSCAASGFTFSNHIMGWFRQAPGKEREWVSGINRDGSTSYADSVKGRFTISADNSKNTAYLQMNSLKPEDTAVYYCAKARQITGWDFDYWGQGTLVTVSS

SEQ ID NO: 801 - protein, 125 aa, synthetic construct
EVQLVESGGGLVQPGGSLRLSCAASGRTFSRYAMGWFRQAPGKEREFVAAINWSGARTYYADSVKGRFTISADNSKNTAYLQMNSLKPEDTAVYYCAVSQPLNYYTYYDARRYDWGQGTLVTVSS

SEQ ID NO: 802 - protein, 126 aa, synthetic construct
EVQLVESGGGLVQPGGSLRLSCAASGPMSSSAVMGWFRQAPGKEREFVAVVTRWSGARTVYADSVKGRFTISADNSKNTAYLQMNSLKPEDTAVYYCAVSQPLNYYTYYDPRRYDWGQGTLVTVSS

SEQ ID NO: 803 - protein, 123 aa, synthetic construct
EVQLVESGGGLVQPGGSLRLSCAASGYTDSNLWMGWFRQAPGKEREFVGSIDWIPSNIYYADSVKGRFTISADNSKNTAYLQMNSLKPEDTAVYYCAANGIESYGWGNRHFNWGQGTLVTVSS

SEQ ID NO: 804 - protein, 123 aa, synthetic construct
EVQLVESGGGLVQPGGSLRLSCAASGFTFSNYWMGWFRQAPGKEREFVATIPWSGAYTEYADSVKGRFTISADNSKNTAYLQMNSLKPEDTAVYYCAAANEYWVYVNPNRYTWGQGTLVTVSS

SEQ ID NO: 805 - protein, 112 aa, synthetic construct
EVQLVESGGGLVQPGGSLRLSCAASGRTFSTYDMGWFRQAPGKEREFVAVINYRGSTTYADSVKGRFTISADNSKNTAYLQMNSLKPEDTAVYYCADVNGDWGQGTLVTVSS

SEQ ID NO: 806 - protein, 122 aa, synthetic construct
EVQLVESGGGLVQPGGSLRLSCAASGSDFSIKAMGWFRQAPGKEREFVADIYTSTTTNYTNYADSVKGRFTISADNSKNTAYLQMNSLKPEDTAVYYCAAIAYEEGVYRWDWGQGTLVTVSS

SEQ ID NO: 807 - protein, 112 aa, synthetic construct
EVQLVESGGGLVQPGGSLRLSCAASGRTFSTYDMGWFRQAPGKERELVASITFGGDTNYADSVKGRFTISADNSKNTAYLQMNSLKPEDTAVYYCADVNGDWGQGTLVTVSS

SEQ ID NO: 808 - protein, 120 aa, synthetic construct
EVQLVESGGGLVQPGGSLRLSCAASGFTVSSYWMGWFRQEPGKERELVAGINWESGSTHYADSVKGRFTISADNSKNTAYLQMNSLKPEDTAVYYCTREYYYDSSGYSYWGQGTLVTVSS

SEQ ID NO: 809 - protein, 123 aa, synthetic construct
EVQLVESGGGLVQPGGSLRLSCAASGYTDSNLWMGWFRQAPGKEREFVASVNWSGKDTYYADSVKGRFTISADNSKNTAYLQMNSLKPEDTAVYYCAANGIESYGWGNRHFNWGQGTLVTVSS

SEQ ID NO: 810 - protein, 113 aa, synthetic construct
EVQLVESGGGLVQPGGSLRLSCAASGRTGSTYDMGWFRQAPGKERELVAAISWRGGSTYYADSVKGRFTISADNSKNTAYLQMNSLKPEDTAVYYCADVNGDWGQGTLVTVSS

SEQ ID NO: 811 - protein, 125 aa, synthetic construct
EVQLVESGGGLVQPGGSLRLSCAASGRTFSRYAMGWFRQAPGKEREFVAAINWSGDRTYYADSVKGRFTISADNSKNTAYLQMNSLKPEDTAVYYCAVSQPLNYYTYYDARRYDWGQGTLVTVSS

SEQ ID NO: 812 - protein, 125 aa, synthetic construct
EVQLVESGGGLVQPGGSLRLSCAASGRTFGSYAMGWFRQAPGKEREFVAAINWSGARTYYADSVKGRFTISADNSKNTAYLQMNSLKPEDTAVYYCAVSQPLNYYTYYDARRYDWGQGTLVTVSS

SEQ ID NO: 813 - protein, 125 aa, synthetic construct
EVQLVESGGGLVQPGGSLRLSCAASGPTFSTYAMGWFRQAPGKEREFVAAISWSGANTYYADSVKGRFTISADNSKNTAYLQMNSLKPEDTAVYYCAVSQPLNYYTYYDARRYDWGQGTLVTVSS

SEQ ID NO: 814 - protein, 113 aa, synthetic construct
EVQLVESGGGLVQPGGSLRLSCAASGRTFSTYDMGWFRQAPGKERELVASIVWIGGRTYYADSVKGRFTISADNSKNTAYLQMNSLKPEDTAVYYCADVNGDWGQGTLVTVSS

SEQ ID NO: 815 - protein, 123 aa, synthetic construct
EVQLVESGGGLVQPGGSLRLSCAASGLPFNNVYMGWFRQAPGKEREFVAAVTWSGAYTEYADSVKGRFTISADNSKNTAYLQMNSLKPEDTAVYYCAAANEYWVYVNPNRYTWGQGTLVTVSS

SEQ ID NO: 816 - protein, 121 aa, synthetic construct
EVQLVESGGGLVQPGGSLRLSCAASGSIFSIYDMGWFRQAPGKEREFVAAISGWSGGRTSYADSVKGRFTISADNSKNTAYLQMNSLKPEDTAVYYCAAIAYEEGVYRWDWGQGTLVTVSS

SEQ ID NO: 817 - protein, 113 aa, synthetic construct
EVQLVESGGGLVQPGGSLRLSCAASGGRFSTYDMGWFRQAPGKEREFVASIVWIGGRTYYADSVKGRFTISADNSKNTAYLQMNSLKPEDTAVYYCADVNGDWGQGTLVTVSS

SEQ ID NO: 818 - protein, 119 aa, synthetic construct
EVQLVESGGGLVQPGGSLRLSCAASGFTLNDYAMGWFRQAPGKEREWVSSINWSGSTYYADSVKGRFTISADNSKNTAYLQMNSLKPEDTAVYYCAKAYSSSWPYFDYWGQGTLVTVSS

SEQ ID NO: 819 - protein, 125 aa, synthetic construct
EVQLVESGGGLVQPGGSLRLSCAASGGTFSAYTMGWFRQAPGKEREFVAAISWSGGSTYYADSVKGRFTISADNSKNTAYLQMNSLKPEDTAVYYCAVSQPLNYYTYYDARRYDWGQGTLVTVSS

SEQ ID NO: 820 - protein, 113 aa, synthetic construct
EVQLVESGGGLVQPGGSLRLSCAASGGTLRGFDIGWFRQAPGKEREFVAAVTWSGGSTNYADSVKGRFTISADNSKNTAYLQMNSLKPEDTAVYYCADVNGDWGQGTLVTVSS

SEQ ID NO: 821 - protein, 112 aa, synthetic construct
EVQLVESGGGLVQPGGSLRLSCAASGRTFDSYDMGWFRQAPGKERELVASITFGGVTNYADSVKGRFTISADNSKNTAYLQMNSLKPEDTAVYYCADVNGDWGQGTLVTVSS

SEQ ID NO: 822 - protein, 122 aa, synthetic construct
EVQLVESGGGLVQPGGSLRLSCAASGNDFSIKAMGWFRQAPGKEREFVADIYTSTTTNYTNYADSVKGRFTISADNSKNTAYLQMNSLKPEDTAVYYCAAIAHEEGVYRWDWGQGTLVTVSS

SEQ ID NO: 823 - protein, 121 aa, synthetic construct
EVQLVESGGGLVQPGGSLRLSCAASGRSFNLYYMGWFRQAPGKEREFVASIFTDDGDSYYADSVKGRFTISADNSKNTAYLQMNSLKPEDTAVYYCAAGAGWAGTMTDYNWGQGTLVTVSS

SEQ ID NO: 824 - protein, 118 aa, synthetic construct; identical to SEQ ID NO: 314

SEQ ID NO: 825 - protein, 113 aa, synthetic construct
EVQLVESGGGLVQPGGSLRLSCAASGRTFSTYDMGWFRQAPGKEREFVAAISWSGGSTNYADSVKGRFTISADNSKNTAYLQMNSLKPEDTAVYYCADVNGDWGQGTLVTVSS

SEQ ID NO: 826 - protein, 125 aa, synthetic construct
EVQLVESGGGLVQPGGSLRLSCAASGRTYNSYSMGWFRQAPGKEREFVAAISWSGEHTYYADSVKGRFTISADNSKNTAYLQMNSLKPEDTAVYYCAVSQPLNYYTYYDARRYDWGQGTLVTVSS

SEQ ID NO: 827 - protein, 125 aa, synthetic construct
EVQLVESGGGLVQPGGSLRLSCAASGGAFSTVAMGWFRQAPGKEREFVAAISWSRGRTFYADSVKGRFTISADNSKNTAYLQMNSLKPEDTAVYYCAVSQPLNYYTYYDARRYDWGQGTLVTVSS

SEQ ID NO: 828 - protein, 123 aa, synthetic construct
EVQLVESGGGLVQPGGSLRLSCAASGRSRYGMGWFRQAPGKEREFVAAINWNGASTYYADSVKGRFTISADNSKNTAYLQMNSLKPEDTAVYYCAVSQPLNYYTYYDARRYDWGQGTLVTVSS

SEQ ID NO: 829 - protein, 123 aa, synthetic construct
EVQLVESGGGLVQPGGSLRLSCAASGRAFSSTVMGWFRQAPGKEREFVAGIGWTDAYTEYADSVKGRFTISADNSKNTAYLQMNSLKPEDTAVYYCAAANEYWVYVNPNRYTWGQGTLVTVSS

SEQ ID NO: 830 - protein, 115 aa, synthetic construct
EVQLVESGGGLVQPGGSLRLSCAASGFTFSTYTMGWFRQAPGKEREFVAGIAWNGASGTLTSYADSVKGRFTISADNSKNTAYLQMNSLKPEDTAVYYCASAGRWGQGTLVTVSS

SEQ ID NO: 831 - protein, 125 aa, synthetic construct
EVQLVESGGGLVQPGGSLRLSCAASGGTFSRYAMGWFRQAPGKEREFVAAVNWSGARTYYADSVKGRFTISADNSKNTAYLQMNSLKPEDTAVYYCAVSQPLNYYTYYDARRYDWGQGTLVTVSS

SEQ ID NO: 832 - protein, 113 aa, synthetic construct
EVQLVESGGGLVQPGGSLRLSCAASGRTFSSYDMGWFRQAPGKEREFVAAIVWIGGRTYYADSVKGRFTISADNSKNTAYLQMNSLKPEDTAVYYCADVNGDWGQGTLVTVSS

SEQ ID NO: 833 - protein, 125 aa, synthetic construct
EVQLVESGGGLVQPGGSLRLSCAASGGTFSRYAMGWFRQAPGKEREFVAAISWSGANTYYADSVKGRFTISADNSKNTAYLQMNSLKPEDTAVYYCAVSQPLNYYTYYDARRYDWGQGTLVTVSS

SEQ ID NO: 834 - protein, 113 aa, synthetic construct
EVQLVESGGGLVQPGGSLRLSCAASGRSFSTYDMGWFRQAPGKERELVAAISWSGGSTYYADSVKGRFTISADNSKNTAYLQMNSLKPEDTAVYYCADVNGDWGQGTLVTVSS

SEQ ID NO: 835 - protein, 120 aa, synthetic construct
EVQLVESGGGLVQPGGSLRLSCAASGFDFSVSWMGWFRQAPGKEREFVGSIDWITTNIYYADSVKGRFTISADNSKNTAYLQMNSLKPEDTAVYYCAANIEAGTTKSQGWGQGTLVTVSS

SEQ ID NO: 836 - protein, 126 aa, synthetic construct
EVQLVESGGGLVQPGGSLRLSCAASGFTLGDYVMGWFRQAPGKEREFVATIRWGTTDTYYADSVKGRFTISADNSKNTAYLQMNSLKPEDTAVYYCQSWYYDILTGYSDYYYMDVWGQGTLVTVSS

SEQ ID NO: 837 - protein, 117 aa, synthetic construct
EVQLVESGGGLVQPGGSLRLSCAASGGTFSNYAMGWFRQAPGKEREFVAAIGGVTDYADSVKGRFTISADNSKNTAYLQMNSLKPEDTAVYYCAAFAYEEGVYRWDWGQGTLVTVSS

SEQ ID NO: 838 - protein, 113 aa, synthetic construct
EVQLVESGGGLVQPGGSLRLSCAASGRTFSSYDMGWFRQAPGKERELVAAITWNSGSTLYADSVKGRFTISADNSKNTAYLQMNSLKPEDTAVYYCADVNGDWGQGTLVTVSS

SEQ ID NO: 839 - protein, 123 aa, synthetic construct
EVQLVESGGGLVQPGGSLRLSCAASGFTFSTYWMGWFRQAPGKEREFVATIPWIGAHTEYADSVKGRFTISADNSKNTAYLQMNSLKPEDTAVYYCAEANEYWGYVNPNRYTWGPGTLVTVSH

SEQ ID NO: 840 - protein, 126 aa, synthetic construct
EVQLVESGGGLVQPGGSLRLSCAASGSIFSIDAMGWFRQAPGKERESVAIIKTDGSTYYADSVKGRFTISADNSKNTAYLQMNSLKPEDTAVYYCAHRLGYCSGGSCYWPNYFDYWGQGTLVTVSS

SEQ ID NO: 841 - protein, 117 aa, synthetic construct
EVQLVESGGGLVQPGGSLRLSCAASGFTFSPSWMGWFRQAPGKEREWVSSIDYSAEDTYYADSVKGRFTISADNSKNTAYLQMNSLKPEDTAVYYCAAFDGYSGSDWGQGTLVTVSS

SEQ ID NO: 842 - protein, 112 aa, synthetic construct
EVQLVESGGGLVQPGGSLRLSCAASGRTSTYDMGWFRQAPGKEREFVGAISWSGGLTSYADSVKGRFTISADNSKNTAYLQMNSLKPEDTAVYYCADVNGDWGQGTLVTVSS

SEQ ID NO: 843 - protein, 124 aa, synthetic construct
EVQLVESGGGLVQPGGSLRLSCAASGSTFSPNVMGWFRQAPGKEREFVAAITWSGSSTTEYADSVKGRFTISADNSKNTAYLQMNSLKPEDTAVYYCAAANEYWVYVNPNRYTWGQGTLVTVSS

SEQ ID NO: 844 - protein, 122 aa, synthetic construct
EVQLVESGGGLVQPGGSLRLSCAASGRYFSDYNMGWFRQAPGKEREFVAAISPSAFTEYADSVKGRFTISADNSKNTAYLQMNSLKPEDTAVYYCAAANEYWVYVNPNRYTWGQGTLVTVSS

SEQ ID NO: 845 - protein, 123 aa, synthetic construct
EVQLVESGGGLVQPGGSLRLSCAASGYTDSNLWMGWFRQAPGKEREFVASIDWSGRSTYYADSVKGRFTISADNSKNTAYLQMNSLKPEDTAVYYCAANGIESYGWGNRHFNWGQGTLVTVSS

SEQ ID NO: 846 - protein, 113 aa, synthetic construct
EVQLVESGGGLVQPGGSLRLSCAASGRTFSTYDMGWFRQAPGKEREFVAAISWGGGLTVYADSVKGRFTISADNSKNTAYLQMNSLKPEDTAVYYCADVNGDWGQGTLVTVSS

SEQ ID NO: 847 - protein, 125 aa, synthetic construct
EVQLVESGGGLVQPGGSLRLSCAASGRAFSRYAMGWFRQAPGKEREFVTAINWSGARTYYADSVKGRFTISADNSKNTAYLQMNSLKPEDTAVYYCAVSQPLNYYTYYDARRYDWGQGTLVTVSS

SEQ ID NO: 848 - protein, 120 aa, synthetic construct
EVQLVESGGGLVQPGGSLRLSCAASGLTAGTYAMGWFRQAPGKEREGVAAIDWDGSRTQYADSVNGRFTISADNSKNTAYLQMNSLKPEDTAVYYCAAIAYEEGVYRWDWGQGTLVTVSS

SEQ ID NO: 849 - protein, 111 aa, synthetic construct
EVQLVESGGGLVQPGGSLRLSCAASGRTFSTYDMGWFRQAPGKERELVASITYLGRTYADSVKGRFTISADNSKNTAYLQMNSLKPEDTAVYYCADINGDWGQGTLVTVSS

SEQ ID NO: 850 - protein, 111 aa, synthetic construct
EVQLVESGGGLVQPGGSLRLSCAASGRTFDSYDMGWFRQAPGKERELVASITYLGRTYADSVKGRFTISADNSKNTAYLQMNSLKPEDTAVYYCADVNGDWGQGTLVTVSS

SEQ ID NO: 851 - protein, 114 aa, synthetic construct
EVQLVESGGGLVQPGGSLRLSCAASGNVFMIKDMGWFRQAPGKEREWVASISSGGTTAYADSVKGRFTISADNSKNTAYLQMNSLKPEDTAVYYCAARRWGYDWGQGTLVTVSS

SEQ ID NO: 852 - protein, 113 aa, synthetic construct
EVQLVESGGGLVQPGGSLRLSCAASGRTFSSYDMGWFRQAPGKEREFVAAITWSGGSTVYADSVKGRFTISADNSKNTAYLQMNSLKPEDTAVYYCADVNGDWGQGTLVTVSS

SEQ ID NO: 853 - protein, 112 aa, synthetic construct
EVQLVESGGGLVQPGGSLRLSCAASGRTFSTYDMGWFRQAPGKERELVASITFGGVTNYADSVKGRFTISADNSKNTAYLQMNSLKPEDTAVYYCADVNGDWGQGTLVTVSS

SEQ ID NO: 854 - protein, 122 aa, synthetic construct
EVQLVESGGGLVQPGGSLRLSCAASGVTLDLYAMGWFRQAPGKEREHVAAISSSGVTTIYADSVKGRFTISADNSKNTAYLQMNSLKPEDTAVYYCAAKPGWVARDPSQYNWGQGTLVTVSS

SEQ ID NO: 855 - protein, 112 aa, synthetic construct
EVQLVESGGGLVQPGGSLRLSCAASGRTFSTYDMGWFRQAPGKERELVATINWSGVTAYADSVKGRFTISADNSKNTAYLQMNSLKPEDTAVYYCADVNGDWGQGTLVTVSS

SEQ ID NO: 856 - protein, 113 aa, synthetic construct
EVQLVESGGGLVQPGGSLRLSCAASGRTFSTYDMGWFRQAPGKEREFVAAITWNSGRTNYADSVKGRFTISADNSKNTAYLQMNSLKPEDTAVYYCADVNGDWGQGTLVTVSS

SEQ ID NO: 857 - protein, 118 aa, synthetic construct
EVQLVESGGGLVQPGGSLRLSCAASGFTFSNHIMGWFRQAPGKEREWVSGINRDGSTYADSVKGRFTISADNSKNTAYLQMNSLKPEDTAVYYCAKARQITGWDFDYWGQGTLVTVSS

SEQ ID NO: 858 - protein, 115 aa, synthetic construct
EVQLVESGGGLVQPGGSLRLSCAASGSDFSIKAMGWFRQAPGKEREFVADIYTSTTTNYTNYADSVKGRFTISADNSKNTAYLQMNSLKPEDTAVYYCADVNGDWGQGTLVTVSS

SEQ ID NO: 859 - protein, 125 aa, synthetic construct
EVQLVESGGGLVQPGGSLRLSCAASGSDFSIKAMGWFRQAPGKEREFVADIYTSTTTNYTNYADSVKGRFTISADNSKNTAYLQMNSLKPEDTAVYYCAAANEYWVYVNPNRYTWGQGTLVTVSS

SEQ ID NO: 860 - protein, 111 aa, synthetic construct
EVQLVESGGGLVQPGGSLRLSCAASGTFDSYDMGWFRQAPGKERELVASITFGGVTNYADSVKGRFTISADNSKNTAYLQMNSLKPEDTAVYYCADVNGDWGQGTLVTVSS

SEQ ID NO: 861 - protein, 120 aa, synthetic construct
EVQLVESGGGLVQPGGSLRLSCAASGFIFSSYWMGWFRQAPGKEREFVATISWSGAYTEYADSVKGRFTISADNSKNTAYLQMNSLKPEDTAVYYCAAIAYEEGVYRWDWGQGTLVTVSS

SEQ ID NO: 862 - protein, 113 aa, synthetic construct
EVQLVESGGGLVQPGGSLRLSCAASGFIFSSYWMGWFRQAPGKEREFVATISWSGAYTEYADSVKGRFTISADNSKNTAYLQMNSLKPEDTAVYYCADVNGDWGQGTLVTVSS

SEQ ID NO: 863 - protein, 113 aa, synthetic construct
EVQLVESGGGLVQPGGSLRLSCAASGGTFSSYDMGWFRQAPGKERELVASISFLGHTTNYADSVKGRFTISADNSKNTAYLQMNSLKPEDTAVYYCADVNGDWGQGTLVTVSS

SEQ ID NO: 864 - protein, 113 aa, synthetic construct
EVQLVESGGGLVQPGGSLRLSCAASGRTISSYDMGWFRQAPGKEREFVASIVWIGGRTYYADSVKGRFTISADNSKNTAYLQMNSLKPEDTAVYYCADVNGDWGQGTLVTVSS

SEQ ID NO: 865 - protein, 113 aa, synthetic construct
EVQLVESGGGLVQPGGSLRLSCAASGRTFSTYDMGWFRQAPGKEREFVAAITWNGASTSYADSVKGRFTISADNSKNTAYLQMNSLKPEDTAVYYCADVNGDWGQGTLVTVSS

SEQ ID NO: 866 - protein, 117 aa, synthetic construct
EVQLVESGGGLVQPGGSLRLSCAASGLTFSPSAMGWFRQAPGKEREFVAAISRFGSTYYADSVKGRFTISADNSKNTAYLQMNSLKPEDTAVYYCAMSIVKSGGADWGQGTLVTVSS

SEQ ID NO: 867 - protein, 119 aa, synthetic construct
EVQLVESGGGLVQPGGSLRLSCAASGLTFDDSAMGWFRQAPGKERELVALIHTGGGATYYADSVKGRFTISADNSKNTAYLQMNSLKPEDTAVYYCARDYGDWGYFDYWGQGTLVTVSS

SEQ ID NO: 868 - protein, 120 aa, synthetic construct
EVQLVESGGGLVQPGGSLRLSCAASGGRFSTYDMGWFRQAPGKEREFVASIVWIGGRTYYADSVKGRFTISADNSKNTAYLQMNSLKPEDTAVYYCAAIAYEEGVYRWDWGQGTLVTVSS

SEQ ID NO: 869 - protein, 115 aa, synthetic construct
EVQLVESGGGLVQPGGSLRLSCAASGFTLSSNWMGWFRQAPGKEREWVSSVDRDGGSTYYADSVKGRFTISADNSKNTAYLQMNSLKPEDTAVYYCASRVDDRVWGQGTLVTVSS

SEQ ID NO: 870 - protein, 110 aa, synthetic construct
EVQLVESGGGLVQPGGSLRLSCAASGGSFSVKDMGWFRQAPGKEREFVSSISGGTTYADSVKGRFTISADNSKNTAYLQMNSLKPEDTAVYYCADVNGDWGQGTLVTVSS

SEQ ID NO: 871 - protein, 111 aa, synthetic construct
EVQLVESGGGLVQPGGSLRLSCAASGRTFSTYDMGWFRQAPGKERELVASITYLGRTYADSVKGRFTISADNSKNTAYLQMNSLKPEDTAVYYCADVNGDWGQGTLVTVSS

SEQ ID NO: 872 - protein, 113 aa, synthetic construct
EVQLVESGGGLVQPGGSLRLSCAASGGTFSTYDMGWFRQAPGKERELVAAITWSGGSTVYADSVKGRFTISADNSKNTAYLQMNSLKPEDTAVYYCADVNGDWGQGTLVTVSS

SEQ ID NO: 873 - protein, 119 aa, synthetic construct
EVQLVESGGGLVQPGGSLRLSCAASGTLHRFDMGWFRQAPGKEREFVASINWSGVNAYYADSVKGRFTISADNSKNTAYLQMNSLKPEDTAVYYCAAIAHEEGVYRWDWGQGTLVTVSS

SEQ ID NO: 874 - protein, 119 aa, synthetic construct
EVQLVESGGGLVQPGGSLRLSCAASGGSFSVKDMGWFRQAPGKEREFLASIRWNAKPYYADSVKGRFTISADNSKNTAYLQMNSLKPEDTAVYYCAAIAYEEGVYRWDWGQGTLVTVSS

SEQ ID NO: 875 - protein, 120 aa, synthetic construct
EVQLVESGGGLVQPGGSLRLSCAASGGSFSVKDMGWFRQAPGKEREFVSSISGGTTYADSVKGRFTISADNSKNTAYLQMNSLKPEDTAVYYCAAANEYWVYVNPNRYTWGQGTLVTVSS

SEQ ID NO: 876 - protein, 115 aa, synthetic construct
EVQLVESGGGLVQPGGSLRLSCAASGIAQSIRVMGWFRQAPGKEREFVAAISRSGGNTWYADSVKGRFTISADNSKNTAYLQMNSLKPEDTAVYYCARDGGYLWWGQGTLVTVSS

SEQ ID NO: 877 - protein, 112 aa, synthetic construct
EVQLVESGGGLVQPGGSLRLSCAASGRTFSTYDMGWFRQAPGKERELVASITYGGNTNYADSVKGRFTISADNSKNTAYLQMNSLKPEDTAVYYCADVNGDWGQGTLVTVSS

SEQ ID NO: 878 - protein, 118 aa, synthetic construct
EVQLVESGGGLVQPGGSLRLSCAASGSIFRLSTMGWFRQAPGKEREGVSGISSSDGSTTYADSVKGRFTISADNSKNTAYLQMNSLKPEDTAVYYCAAQTEDSAQYIWGQGTLVTVSS

SEQ ID NO: 879 - protein, 117 aa, synthetic construct
EVQLVESGGGLVQPGGSLRLSCAASGGIYRVNTMGWFRQAPGKEREFVASITSDDRTYADSVKGRFTISADNSKNTAYLQMNSLKPEDTAVYYCAQFAYSFYYFQYWGQGTLVTVSS

SEQ ID NO: 880 - protein, 123 aa, synthetic construct
EVQLVESGGGLVQPGGSLRLSCAASGGRFSTYDMGWFRQAPGKEREFVASIVWIGGRTYYADSVKGRFTISADNSKNTAYLQMNSLKPEDTAVYYCAAANEYWVYVNPNRYTWGQGTLVTVSS

SEQ ID NO: 881 - protein, 117 aa, synthetic construct
EVQLVESGGGLVQPGGSLRLSCAASGGTFSDLAMGWFRQAPGKEREFVAAISRSGGTTYYADSVKGRFTISADNSKNTAYLQMNSLKPEDTAVYYCARGSGYGDDYWGQGTLVTVSS

SEQ ID NO: 882 - protein, 117 aa, synthetic construct
EVQLVESGGGLVQPGGSLRLSCAASGSTLRDYAMGWFRQAPGKEREFVAAIRWSGGNTYYADSVKGRFTISADNSKNTAYLQMNSLKPEDTAVYYCARLWGRDVLGWGQGTLVTVSS

SEQ ID NO: 883 - protein, 111 aa, synthetic construct
EVQLVESGGGLVQPGGSLRLSCAASGSDYRWMYMGWFRQAPGKEREFVASISGGGSTYYADSVKGRFTISADNSKNTAYLQMNSLKPEDTAVYYCASAGRWGQGTLVTVSS

SEQ ID NO: 884 - protein, 123 aa, synthetic construct
EVQLVESGGGLVQPGGSLRLSCAASGLTFSLYRMGWFRQAPGKEREGVASIDSDGTTYADSVKGRFTISADNSKNTAYLQMNSLKPEDTAVYYCAREDYDFWKGYYQKYFQHWGQGTLVTVSS

SEQ ID NO: 885 - protein, 125 aa, synthetic construct
EVQLVESGGGLVQPGGSLRLSCAASGPTFSTYAMGWFRQAPGKEREFVAAINWSGARTYYADSVKGRFTISADNSKNTAYLQMNSLKPEDTAVYYCAVSQPLNYYTYYDARRYDWGQGTLVTVSS

SEQ ID NO: 886 - protein, 122 aa, synthetic construct
EVQLVESGGGLVQPGGSLRLSCAASGNDFSIKAMGWFRQAPGKEREFVADIYTSTTTNYTNYADSVKGRFTISADNSKNTAYLQMNSLKPEDTAVYYCAAIAYEEGVYRWDWGQGTLVTVSS

SEQ ID NO: 887 - protein, 122 aa, synthetic construct
EVQLVESGGGLVQPGGSLRLSCAASGITFRRYHMGWFRQAPGKEREFVAAISPSAFTEYADSVKGRFTISADNSKNTAYLQMNSLKPEDTAVYYCAAANEYWVYVNPNRYTWGQGTLVTVSS

SEQ ID NO: 888 - protein, 119 aa, synthetic construct
EVQLVESGGGLVQPGGSLRLSCAASGGRTFSRYAMGWFRQAPGKEREFVAHVSHDGYSMYADSVKGRFTISADNSKNTAYLQMNSLKPEDTAVYYCARDEGSWGYFDYWGQGTLVTVSS

SEQ ID NO: 889 - protein, 115 aa, synthetic construct
EVQLVESGGGLVQPGGSLRLSCAASGSTFRTDMMGWFRQAPGKEREFVASIMTDGTYYADSVKGRFTISADNSKNTAYLQMNSLKPEDTAVYYCAVVDLLRGKLWGQGTLVTVSS

SEQ ID NO: 890 - protein, 118 aa, synthetic construct
EVQLVESGGGLVQPGGSLRLSCAASGVDFSRHVMGWFRQAPGKEREFVAAISRSGGSTYYADSVKGRFTISADNSKNTAYLQMNSLKPEDTAVYYCASALNGRLPGRWGQGTLVTVSS

SEQ ID NO: 891 - protein, 114 aa, synthetic construct
EVQLVESGGGLVQPGGSLRLSCAASGGRSFSTYDMGWFRQAPGKEREFVAAIVWIGGRTYYADSVKGRFTISADNSKNTAYLQMNSLKPEDTAVYYCADVNGDWGQGTLVTVSS

SEQ ID NO: 892 - protein, 122 aa, synthetic construct
EVQLVESGGGLVQPGGSLRLSCAASGLTFSIYPMGWFRQAPGKEREFVATISVSGDSTYYADSVKGRFTISADNSKNTAYLQMNSLKPEDTAVYYCARGYDFWSGYGNLDYWGQGTLVTVSS

SEQ ID NO: 893 - protein, 120 aa, synthetic construct
EVQLVESGGGLVQPGGSLRLSCAASGRTFSTYDMGWFRQAPGKERELVASIVWIGGRTYYADSVKGRFTISADNSKNTAYLQMNSLKPEDTAVYYCAAIAYEEGVYRWDWGQGTLVTVSS

SEQ ID NO: 894 - protein, 117 aa, synthetic construct
EVQLVESGGGLVQPGGSLRLSCAASGGTFSSYAMGWFRQAPGKEREFVAAISSSGGTTYYADSVKGRFTISADNSKNTAYLQMNSLKPEDTAVYYCARGSGYGDDYWGQGTLVTVSS

SEQ ID NO: 895 - protein, 118 aa, synthetic construct
EVQLVESGGGLVQPGGSLRLSCAASGRTFDSYDMGWFRQAPGKERELVASITYLGRTYADSVKGRFTISADNSKNTAYLQMNSLKPEDTAVYYCAAIAYEEGVYRWDWGQGTLVTVSS

SEQ ID NO: 896 - protein, 117 aa, synthetic construct
EVQLVESGGGLVQPGGSLRLSCAASGDIFTLASMGWFRQAPGKEREFVAGISRSGASTAYADSVKGRFTISADNSKNTAYLQMNSLKPEDTAVYYCARGSVGGFDPWGQGTLVTVSS

SEQ ID NO: 897 - protein, 119 aa, synthetic construct
EVQLVESGGGLVQPGGSLRLSCAASGRTKDMGWFRQAPGKEREFVAAISPSGSLKAYADSVKGRFTISADNSKNTAYLQMNSLKPEDTAVYYCAAREWPFSTIPSGWRWGQGTLVTVSS

SEQ ID NO: 898 - protein, 125 aa, synthetic construct
EVQLVESGGGLVQPGGSLRLSCAASGHTFSSYAMGWFRQAPGKEREFVGAINWSGARTYYADSVKGRFTISADNSKNTAYLQMNSLKPEDTAVYYCAVSQPLNYYTYYDARRYDWGQGTLVTVSS

SEQ ID NO: 899 - protein, 112 aa, synthetic construct
EVQLVESGGGLVQPGGSLRLSCAASGFILREYNMGWFRQAPGKEREFVAAISPSAFTEYADSVKGRFTISADNSKNTAYLQMNSLKPEDTAVYYCADVNGDWGQGTLVTVSS

SEQ ID NO: 900 - protein, 118 aa, synthetic construct
EVQLVESGGGLVQPGGSLRLSCAASGRTFSTYDMGWFRQAPGKERELVASITYLGRTYADSVKGRFTISADNSKNTAYLQMNSLKPEDTAVYYCAAIAYEEGVYRWDWGQGTLVTVSS

SEQ ID NO: 901 - protein, 120 aa, synthetic construct
EVQLVESGGGLVQPGGSLRLSCAASGGTFSSYWMGWFRQAPGKEREWVSSIDYSAEDTYYADSVKGRFTISADNSKNTAYLQMNSLKPEDTAVYYCAAIAHEEGVYRWDWGQGTLVTVSS

SEQ ID NO: 902 - protein, 123 aa, synthetic construct
EVQLVESGGGLVQPGGSLRLSCAASGFILREYNMGWFRQAPGKEREFVAGITSSGGFTEYADSVKGRFTISADNSKNTAYLQMNSLKPEDTAVYYCAAANEYWVYVNPNRYTWGQGTLVTVSS

SEQ ID NO: 903 - protein, 120 aa, synthetic construct
EVQLVESGGGLVQPGGSLRLSCAASGFAFSSDWMGWFRQAPGKEREWVSSIDYSAEDTYYADSVKGRFTISADNSKNTAYLQMNSLKPEDTAVYYCAAIAHEEGVYRWDWGQGTLVTVSS

SEQ ID NO: 904 - protein, 119 aa, synthetic construct
EVQLVESGGGLVQPGGSLRLSCAASGFILREYNMGWFRQAPGKEREFVAAISPSAFTEYADSVKGRFTISADNSKNTAYLQMNSLKPEDTAVYYCAAIAYEEGVYRWDWGQGTLVTVSS

SEQ ID NO: 905 - protein, 113 aa, synthetic construct
EVQLVESGGGLVQPGGSLRLSCAASGRTGSTYDMGWFRQAPGKERELVAAISWSGGSTYYADSVKGRFTISADNSKNTAYLQMNSLKPEDTAVYYCADVNGDWGQGTLVTVSS

SEQ ID NO: 906 - protein, 118 aa, synthetic construct
EVQLVESGGGLVQPGGSLRLSCAASGVFGPIRAMGWFRQAPGKEREYVAVINWSGGLFYADSVKGRFTISADNSKNTAYLQMNSLKPEDTAVYYCALTQSGSFYQVDWGQGTLVTVSS

SEQ ID NO: 907 - protein, 121 aa, synthetic construct
EVQLVESGGGLVQPGGSLRLSCAASGRTFDSYDMGWFRQAPGKERELVASITYLGRTYADSVKGRFTISADNSKNTAYLQMNSLKPEDTAVYYCAAANEYWVYVNPNRYTWGQGTLVTVSS

SEQ ID NO: 908 - protein, 117 aa, synthetic construct
EVQLVESGGGLVQPGGSLRLSCAASGRTFSNYGWFRQAPGKEREWVSSIDYSAEDTYYADSVKGRFTISADNSKNTAYLQMNSLKPEDTAVYYCAAWGQDGFTGKNWGQGTLVTVSS

SEQ ID NO: 909 - protein, 112 aa, synthetic construct
EVQLVESGGGLVQPGGSLRLSCAASGRTFNRYPMGWFRQAPGKEREFVAAISRDGDRTYYADSVKGRFTISADNSKNTAYLQMNSLKPEDTAVYYCIVGTYWGQGTLVTVSS

SEQ ID NO: 910 - protein, 111 aa, synthetic construct
EVQLVESGGGLVQPGGSLRLSCAASGRTFSTYDMGWFRQAPGKEREFVAAITWDGSTYADSVKGRFTISADNSKNTAYLQMNSLKPEDTAVYYCADVNGDWGQGTLVTVSS

SEQ ID NO: 911 - protein, 113 aa, synthetic construct
EVQLVESGGGLVQPGGSLRLSCAASGRTFSTYDMGWFRQAPGKEREFVAAITWSSRSTVYADSVKGRFTISADNSKNTAYLQMNSLKPEDTAVYYCADVNGDWGQGTLVTVSS

SEQ ID NO: 912 - protein, 119 aa, synthetic construct
EVQLVESGGGLVQPGGSLRLSCAASGSIFSIGMGWFRQAPGKEREFVAHIFRSGITTYADSVKGRFTISADNSKNTAYLQMNSLKPEDTAVYYCAKDRSQGGRNEFDYWGQGTLVTVSS

SEQ ID NO: 913 - protein, 123 aa, synthetic construct
EVQLVESGGGLVQPGGSLRLSCAASGYTDSNLWMGWFRQAPGKEREWVASINWSGGSTYYADSVKGRFTISADNSKNTAYLQMNSLKPEDTAVYYCAANGIESYGWGNRHFNWGQGTLVTVSS

SEQ ID NO: 914 - protein, 113 aa, synthetic construct
EVQLVESGGGLVQPGGSLRLSCAASGSTFSRYDMGWFRQAPGKERELVASIVWIGGRTYYADSVKGRFTISADNSKNTAYLQMNSLKPEDTAVYYCADVNGDWGQGTLVTVSS

SEQ ID NO: 915 - protein, 120 aa, synthetic construct; identical to SEQ ID NO: 475

SEQ ID NO: 916 - protein, 120 aa, synthetic construct
EVQLVESGGGLVQPGGSLRLSCAASGRTLSTTAMGWFRQAPGKEREFVAVISWNNNYIHYADSVKGRFTISADNSKNTAYLQMNSLKPEDTAVYYCAASPGGVRGAIDYWGQGTLVTVSS

SEQ ID NO: 917 - protein, 113 aa, synthetic construct
EVQLVESGGGLVQPGGSLRLSCAASGRTGSTYDMGWFRQAPGKERELVAAISWSGDNTHYADSVKGRFTISADNSKNTAYLQMNSLKPEDTAVYYCADVNGDWGQGTLVTVSS

SEQ ID NO: 918 - protein, 119 aa, synthetic construct
EVQLVESGGGLVQPGGSLRLSCAASGIAFSIFDMGWFRQAPGKEREFVASITSGGSTVYADSVKGRFTISADNSKNTAYLQMNSLKPEDTAVYYCAAIAYEEGVYRWDWGQGTLVTVSS

SEQ ID NO: 919 - protein, 113 aa, synthetic construct
EVQLVESGGGLVQPGGSLRLSCAASGLTAGTYAMGWFRQAPGKEREGVAAIDWDGSRTQYADSVNGRFTISADNSKNTAYLQMNSLKPEDTAVYYCADVNGDWGQGTLVTVSS

SEQ ID NO: 920 - protein, 121 aa, synthetic construct
EVQLVESGGGLVQPGGSLRLSCAASGSITSIRSMGWFRQAPGKERESVAAITGTSGGGTDYADSVKGRFTISADNSKNTAYLQMNSLKPEDTAVYYCAAIAYEEGVYRWDWGQGTLVTVSS

SEQ ID NO: 921 - protein, 119 aa, synthetic construct
EVQLVESGGGLVQPGGSLRLSCAASGIPSTIRAMGWFRQAPGKEREFVAAITRSAGSLTWYADSVKGRFTISADNSKNTAYLQMNSLKPEDTAVYYCARDHANGSEPYWGQGTLVTVSS

SEQ ID NO: 922 - protein, 121 aa, synthetic construct
EVQLVESGGGLVQPGGSLRLSCAASGPMSSSAVMGWFRQAPGKEREFVAVVTRWSGARTVYADSVKGRFTISADNSKNTAYLQMNSLKPEDTAVYYCAAIAYEEGVYRWDWGQGTLVTVSS

SEQ ID NO: 923 - protein, 125 aa, synthetic construct
EVQLVESGGGLVQPGGSLRLSCAASGFIFSSYWMGWFRQAPGKEREFVATISWSGAYTEYADSVKGRFTISADNSKNTAYLQMNSLKPEDTAVYYCAVSQPLNYYTYYDARRYDWGQGTLVTVSS

SEQ ID NO: 924 - protein, 117 aa, synthetic construct
EVQLVESGGGLVQPGGSLRLSCAASGSITSIRSMGWFRQAPGKEREAVAAIGGVTDYADSVKGRFTISADNSKNTAYLQMNSLKPEDTAVYYCAAIAHEEGVYRWDWGQGTLVTVSS

SEQ ID NO: 925 - protein, 113 aa, synthetic construct
EVQLVESGGGLVQPGGSLRLSCAASGRTFSSYDMGWFRQAPGKERELVAAINWSGSSTVYADSVKGRFTISADNSKNTAYLQMNSLKPEDTAVYYCADVNGDWGQGTLVTVSS

SEQ ID NO: 926 - protein, 121 aa, synthetic construct
EVQLVESGGGLVQPGGSLRLSCAASGSIDNIHAMGWFRQAPGKEREFVAADMWSGTTTYYADSVKGRFTISADNSKNTAYLQMNSLKPEDTAVYYCARRGDYGDYWYFDLWGQGTLVTVSS

SEQ ID NO: 927 - protein, 121 aa, synthetic construct
EVQLVESGGGLVQPGGSLRLSCAASGSILSIHYMGWFRQAPGKEREWVSAINSDGSTYYADSVKGRFTISADNSKNTAYLQMNSLKPEDTAVYYCAVGGREYSGVYYYREWGQGTLVTVSS

SEQ ID NO: 928 - protein, 123 aa, synthetic construct
EVQLVESGGGLVQPGGSLRLSCAASGLTAGTYAMGWFRQAPGKEREGVAAIDWDGSRTQYADSVNGRFTISADNSKNTAYLQMNSLKPEDTAVYYCAAANEYWVYVNPNRYTWGQGTLVTVSS

SEQ ID NO: 929 - protein, 113 aa, synthetic construct
EVQLVESGGGLVQPGGSLRLSCAASGRTFSAYAMGWFRQAPGKEREWVASINWSGGSTYYADSVKGRFTISADNSKNTAYLQMNSLKPEDTAVYYCAIPPGYWGQGTLVTVSS

SEQ ID NO: 930 - protein, 119 aa, synthetic construct
EVQLVESGGGLVQPGGSLRLSCAASGFTFDDAAMGWFRQAPGKEREHVALITRGGTTGYADSVKGRFTISADNSKNTAYLQMNSLKPEDTAVYYCAADDSSAGWPPRNWGQGTLVTVSS

SEQ ID NO: 931 - protein, 114 aa, synthetic construct
EVQLVESGGGLVQPGGSLRLSCAASGVTYSYYTMGWFRQAPGKEREFVAGITRSGGTTNYADSVKGRFTISADNSKNTAYLQMNSLKPEDTAVYYCAIGGSLNWGQGTLVTVSS

SEQ ID NO: 932 - protein, 120 aa, synthetic construct
EVQLVESGGGLVQPGGSLRLSCAASGSISSFNVMGWFRQAPGKEREFVAAISRSGTGTYYADSVKGRFTISADNSKNTAYLQMNSLKPEDTAVYYCARRGDTRSPELDYWGQGTLVTVSS

SEQ ID NO: 933 - protein, 112 aa, synthetic construct
EVQLVESGGGLVQPGGSLRLSCAASGRTFSTYDMGWFRQAPGKEREFVAAITWSGTTNYADSVKGRFTISADNSKNTAYLQMNSLKPEDTAVYYCADVNGDWGQGTLVTVSS

SEQ ID NO: 934 - protein, 113 aa, synthetic construct
EVQLVESGGGLVQPGGSLRLSCAASGRTSSTATMGWFRQAPGKEREFVGSIDWIPSNIYYADSVKGRFTISADNSKNTAYLQMNSLKPEDTAVYYCADVNGDWGQGTLVTVSS

SEQ ID NO: 935 - protein, 122 aa, synthetic construct
EVQLVESGGGLVQPGGSLRLSCAASGFIFSSYWMGWFRQAPGKEREFVADIYTSTTTNYTNYADSVKGRFTISADNSKNTAYLQMNSLKPEDTAVYYCAAIAYEEGVYRWDWGQGTLVTVSS

SEQ ID NO: 936 - protein, 120 aa, synthetic construct
EVQLVESGGGLVQPGGSLRLSCAASGRTFSTYDMGWFRQAPGKEREFVAAISWSGGSTNYADSVKGRFTISADNSKNTAYLQMNSLKPEDTAVYYCAAIAYEEGVYRWDWGQGTLVTVSS

SEQ ID NO: 937 - protein, 127 aa, synthetic construct
EVQLVESGGGLVQPGGSLRLSCAASGGTFSRYAMGWFRQALGKEREFVAAISWNGGSTIYADSVKGRFTISADNSKNTAYLQMNSLKPEDTAVYYCARDLYYDSSGYYYYYYGMDVWGQGTLVTVSS

SEQ ID NO: 938 - protein, 125 aa, synthetic construct
EVQLVESGGGLVQPGGSLRLSCAASGRTFNSYSMGWFRQAPGKEREFVSAITWNGTRTYYADSVKGRFTISADNSKNTAYLQMNSLKPEDTAVYYCAVSQPLNYYTYYDARRYDWGQGTLVTVSS

SEQ ID NO: 939 - protein, 113 aa, synthetic construct
EVQLVESGGGLVQPGGSLRLSCAASGFTFSSYPMGWFRQAPGKEREFVARITFGGVTNYADSVKGRFTISADNSKNTAYLQMNSLKPEDTAVYYCAAYYDYVWGQGTLVTVSS

SEQ ID NO: 940 - protein, 116 aa, synthetic construct
EVQLVESGGGLVQPGGSLRLSCAASGSAFSIKSMGWFRQAPGKEREFVAAISWYAYADSVKGRFTISADNSKNTAYLQMNSLKPEDTAVYYCAAIAYEEGVYRWDWGQGTLVTVSS

SEQ ID NO: 941 - protein, 119 aa, synthetic construct
EVQLVESGGGLVQPGGSLRLSCAASGSIFSIYDMGWFRQAPGKEREFVASINSGSRTNYADSVKGRFTISADNSKNTAYLQMNSLKPEDTAVYYCAAIAYEEGVYRWDWGQGTLVTVSS

SEQ ID NO: 942 - protein, 114 aa, synthetic construct
EVQLVESGGGLVQPGGSLRLSCAASGPMSSSAVMGWFRQAPGKEREFVAVVTRWSGARTVYADSVKGRFTISADNSKNTAYLQMNSLKPEDTAVYYCADVNGDWGQGTLVTVSS

SEQ ID NO: 943 - protein, 114 aa, synthetic construct
EVQLLESGGGLVQPGGSLRLSCAASGFIFQWYDMGWVRQAPGKGLEWVSSIRGSSSSTYYADSVKGRFTISRDNSKNTLYLQMNSLRAEDTAVYYCARDLGDYWGQGTLVTVSS

SEQ ID NO: 944 - protein, 117 aa, synthetic construct
EVQLLESGGGLVQPGGSLRLSCAASGFTFNHYGMGWVRQAPGKGLEWVSGITRSGSTNYRDSVKGRFTISRDNSKNTLYLQMNSLRAEDTAVYYCAKSYLSGTFDYWGQGTLVTVSS

SEQ ID NO: 945 - protein, 116 aa, synthetic construct
EVQLLESGGGLVQPGGSLRLSCAASGFTFPLYEMHWVRQAPGKGLEWVSIISPLGLSTYYADSVKGRFTISRDNSKNTLYLQMNSLRAEDTAVYYCAKSYGAFDYWGQGTLVTVSS

SEQ ID NO: 946 - protein, 118 aa, synthetic construct
EVQLLESGGGLVQPGGSLRLSCAASGFTFSSYWNHWVRQAPGKGLEWVSTIGPSGTSTYYADSVKGRFTISRDNSKNTLYLQMNSLRAEDTAVYYCAKSTPNIPLAYWGQGTLVTVSS

SEQ ID NO: 947 - protein, 117 aa, synthetic construct
EVQLLESGGGLVQPGGSLRLSCAASGFTFPLYEMHWVRQAPGKGLEWVSIISPLGLSTYYADSVKGRFTISRDNSKNTLYLQMNSLRAEDTAVYYCAKAYYGGFDYWGQGTLVTVSS

SEQ ID NO: 948 - protein, 121 aa, synthetic construct
EVQLLESGGGLVQPGGSLRLSCAASGFTFSSYFMSWVRQAPGKGLEWVSEISPSGSETYYADSVKGRFTISRDNSKNTLYLQMNSLRAEDTAVYYCARAYSSGWSLPFDYWGQGTLVTVSS

SEQ ID NO: 949 - protein, 115 aa, synthetic construct
EVQLLESGGGLVQPGGSLRLSCAASGFTFGDHGMGWVRQAPGKGLEWVGVIWGGGGTYYADSVKGRFTISRDNSKNTLYLQMNSLRAEDTAVYYCAKGTTRFDYWGQGTLVTVSS

SEQ ID NO: 950 - protein, 116 aa, synthetic construct
EVQLLESGGGLVQPGGSLRLSCAASGFTFFPYAMGWVRQAPGKGLEWVSWISPHGALTYYADSVKGRFTISRDNSKNTLYLQMNSLRAEDTAVYYCAKGTTRFDYWGQGTLVTVSS

SEQ ID NO: 951 - protein, 119 aa, synthetic construct
EVQLLESGGGLVQPGGSLRLSCAASGFTFSNSYISWVRQAPGKGLEWVSGIYPSGGSTVYADSVKGRFTISRDNSKNTLYLQMNSLRAEDTAVYYCAKVRPFWGTFDYWGQGTLVTVSS

SEQ ID NO: 952 - protein, 118 aa, synthetic construct
EVQLLESGGGLVQPGGSLRLSCAASGFTFNHYGMGWVRQAPGKGLEWVSSIGANGAPTYYADSVKGRFTISRDNSKNTLYLQMNSLRAEDTAVYYCAKSYLSGTFDYWGQGTLVTVSS

SEQ ID NO: 953 - protein, 121 aa, synthetic construct
EVQLLESGGGLVQPGGSLRLSCAASGFTFPSYFMSWVRQAPGKGLEWVSEISPSGSETYYADSVKGRFTISRDNSKNTLYLQMNSLRAEDTAVYYCARAYSSGWSLPFDYWGQGTLVTVSS

SEQ ID NO: 954 - protein, 118 aa, synthetic construct
EVQLLESGGGLVQPGGSLRLSCAASGFTFEQTDMHWVRQAPGKGLEWVSSISPNGWDTYYADSVKGRFTISRDNSKNTLYLQMNSLRAEDTAVYYCAKSRTGRYFDYWGQGTLVTVSS

SEQ ID NO: 955 - protein, 117 aa, synthetic construct
EVQLLESGGGLVQPGGSLRLSCAASGFTFSSAAMSWVRQAPGKGLEWVSAISGSGGNTYYADSVKGRFTISRDNSKNTLYLQMNSLRAEDTAVYYCARSYGGGFDYWGQGTLVTVSS

SEQ ID NO: 956 - protein, 116 aa, synthetic construct
EVQLLESGGGLVQPGGSLRLSCAASGFTFHKYGMAWVRQAPGKGLEWVSAISGSGGRPNYADSVKGRFTISRDNSKNTLYLQMNSLRAEDTAVYYCAKGWRRFDYWGQGTLVTVSS

SEQ ID NO: 957 - protein, 115 aa, synthetic construct
EVQLLESGGGLVQPGGSLRLSCAASGFTFSNYGVSWVRQAPGKGLEWVSGITRSGSTNYRDSVKGRFTISRDNSKNTLYLQMNSLRAEDTAVYYCAKGRRIFDYWGQGTLVTVSS

SEQ ID NO: 958 - protein, 117 aa, synthetic construct; identical to SEQ ID NO: 944

SEQ ID NO: 959 - protein, 116 aa, synthetic construct
EVQLLESGGGLVQPGGSLRLSCAASGFTFNAYPMTWVRQAPGKGLEWVSVISGSGGRTNYADSVKGRFTISRDNSKNTLYLQMNSLRAEDTAVYYCAKSGTDFDYWGQGTLVTVSS

SEQ ID NO: 960 - protein, 116 aa, synthetic construct
EVQLLESGGGLVQPGGSLRLSCAASGFTFPVYNMAWVRQAPGKGLEWVSSISGYGSTTYYADSVKGRFTISRDNSKNTLYLQMNSLRAEDTAVYYCAKSYGAFDYWGQGTLVTVSS

SEQ ID NO: 961 - protein, 113 aa, synthetic construct
EVQLLESGGGLVQPGGSLRLSCAASGFTLSSYAMSWVRQAPGKGLEWVSGSGGSTYYADSVKGRFTISRDNSKNTLYLQMNSLRAEDTAVYYCARGLYSFDYWGQGTLVTVSS

SEQ ID NO: 962 - protein, 118 aa, synthetic construct
EVQLLESGGGLVQPGGSLRLSCAASGFTFGEYNMAWVRQAPGKGLEWVGYINPSRGYTYYADSVKGRFTISRDNSKNTLYLQMNSLRAEDTAVYYCAKAVRNFAFDYWGQGTLVTVSS

SEQ ID NO: 963 - protein, 120 aa, synthetic construct
EVQLLESGGGLVQPGGSLRLSCAASGFTFSEYGMWWVRQAPGKGLEWVSEISPSGGYTYYADSVKGRFTISRDNSKNTLYLQMNSLRAEDTAVYYCAEQDVKGSSSFDYWGQGTLVTVSS

SEQ ID NO: 964 - protein, 115 aa, synthetic construct
EVQLLESGGGLVQPGGSLRLSCAASGFTFSNYGMSWVRQAPGKGLEWVGYISNSGSTSYNDSVKGRFTISRDNSKNTLYLQMNSLRAEDTAVYYCAKAGRKFDYWGQGTLVTVSS

SEQ ID NO: 965 - protein, 117 aa, synthetic construct
EVQLLESGGGLVQPGGSLRLSCAASGLTFPNYGMGWVRQAPGKGLEWVSGITRSGSTNYRDSVKGRFTISRDNSKNTLYLQMNSLRAEDTAVYYCATAESDDKYDYWGQGTLVTVSS

SEQ ID NO: 966 - protein, 117 aa, synthetic construct
EVQLLESGGGLVQPGGSLRLSCAASGFTFSNSYISWVRQAPGKGLEWVSSIRGSSSSTYYADSVKGRFTISRDNSKNTLYLQMNSLRAEDTAVYYCARSYGGGFDYWGQGTLVTVSS

SEQ ID NO: 967 - protein, 118 aa, synthetic construct
EVQLLESGGGLVQPGGSLRLSCAASGFTFSFFDMMWVRQAPGKGLEWVSIISPLGLSTYYADSVKGRFTISRDNSKNTLYLQMNSLRAEDTAVYYCAKSYQAGTFDYWGQGTLVTVSS

SEQ ID NO: 968 - protein, 124 aa, synthetic construct
EVQLLESEGGLVQPGGSLRLSCAASGFTFSGYDMQWVRQAPGKGLEWVSSISSTGFKTYYADSVKGRFTISRDNSKNTLYLQMNSLRAEDTAVYYCAKAGPPFAGSRGNSFDYWGQGTLVTVSS

SEQ ID NO: 969 - protein, 118 aa, synthetic construct
EVQLLESGGGLVQPGGSLRLSCAASGFTFSPRRMSWVRQAPGKGLEWVSTIDDLGRHTYYADSVKGRFTISRDNSKNTLYLQMNSLRAEDTAVYYCAKLANSLLFDYWGQGTLVTVSS

SEQ ID NO: 970 - protein, 116 aa, synthetic construct
EVQLLESGGGLVQPGGSLRLSCAASGFTFSDYDMSWVRQAPGKGLEWVSAIEGAGSDTYYADSVKGRFTISRDNSKNTLYLQMNSLRAEDTAVYYCARLAPEFDYWGQGTLVTVSS

SEQ ID NO: 971 - protein, 116 aa, synthetic construct
EVQLLESGGGLVQPGGSLRLSCAASGFTFGQESMYWVRQAPGKGLEWVSGITRSGSTNYRDSVKGRFTISRDNSKNTLYLQMNSLRAEDTAVYYCAKQLGEEFDYWGQGTLVTVSS

SEQ ID NO: 972 - protein, 115 aa, synthetic construct
EVQLLESGGGLVQPGGSLRLSCAASGFTFDQYDMSWVRQAPGKGLEWVGYISNSGSTSYNDSVKGRFTISRDNSKNTLYLQMNSLRAEDTAVYYCARWTSGLDYWGQGTLVTVSS

SEQ ID NO: 973 - protein, 118 aa, synthetic construct
EVQLLESGGGLVQPGGSLRLSCAASGFTFDQYDMSWVRQAPGKGLEWVSLIPHTGNPTYYADSVKGRFTISRDNSKNTLYLQMNSLRAEDTAVYYCARRHWPGGFDYWGQGTLVTVSS

SEQ ID NO: 974 - protein, 120 aa, synthetic construct
EVQLLESGGGLVQPGGSLRLSCAASGFTFSDYDMSWVRQAPGKGLEWVSSISPSGGWTEYADSVKGRFTISRDNSKNTLYLQMNSLRAEDTAVYYCARHDYSNYPYFDYWGQGTLVTVSS

SEQ ID NO: 975 - protein, 120 aa, synthetic construct
EVQLLESGGGLVQPGGSLRLSCAASGFTFDKYLMSWVRQAPGKGLEWVSAISGRGDNTYYADSVKGRFTISRDNSKNTLYLQMNSLRAEDTAVYYCARGGDTYFDYFDYWGQGTLVTVSS

SEQ ID NO: 976 - protein, 117 aa, synthetic construct
EVQLLESGGGLVQPGGSLRLSCAASGFTFPLYEMHWVRQAPGKGLEWVATISGGGINTYYPDSVKGRFTISRDNSKNTLYLQMNSLRAEDTAVYYCARGPYNYLAYWGQGTLVTVSS

SEQ ID NO: 977 - protein, 116 aa, synthetic construct
EVQLLESGGGLVQPGGSLRLSCAASGFTLSSYAMSWVRQAPGKGLEWVSSISSSGGYTGYADSVKGRFTISRDNSKNTLYLQMNSLRAEDTAVYYCAKSFSFFDYWGQGTLVTVSS

SEQ ID NO: 978 - protein, 114 aa, synthetic construct
EVQLLESGGGLVQPGGSLRLSCAASGFTFDQYDMSWVRQAPGKGLEWVGISNSGSTSYNDSVKGRFTISRDNSKNTLYLQMNSLRAEDTAVYYCARWTSGLDYWGQGTLVTVSS

SEQ ID NO: 979 - protein, 116 aa, synthetic construct
EVQLLESGGGLVQPGGSLRLSCAASGFTFSDYTMNWVRQAPGKGLEWVSGISPSGGITTYADSVKGRFTISRDNSKNTLYLQMNSLRAEDTAVYYCAKGTTRFDYWGQGTLVTVSS

SEQ ID NO: 980 - protein, 116 aa, synthetic construct
EVQLLESGGGLVQPGGSLRLSCAASGFTFSPYLMSWVRQAPGKGLEWVSSISSTGFKTYYADSVKGRFTISRDNSKNTLYLQMNSLRAEDTAVYYCAKGTTRFDYWGQGTLVTVSS

SEQ ID NO: 981 - protein, 116 aa, synthetic construct
EVQLLESGGGLVQPGGSLRLSCAASGLTFPNYGMGWVRQAPGKGLEWVSGISPSGGITTYADSVKGRFTISRDNSKNTLYLQMNSLRAEDTAVYYCAKSGAYFDYWGQGTLVTVSS

SEQ ID NO: 982 - protein, 118 aa, synthetic construct
EVQLLESGGGLVQPGGSLRLSCAASGFTFSSYFMSWVRQAPGKGLEWVSEISPSGSETYYADSVKGRFTISRDNSKNTLYLQMNSLRAEDTAVYYCAKSRTGRYFDYWGQGTLVTVSS

SEQ ID NO: 983 - protein, 117 aa, synthetic construct
EVQLLESGGGLVQPGGSLRLSCAASGFTFGDHGMGWVRQAPGKGLEWVSGITRSGSTNYRDSVKGRFTISRDNSKNTLYLQMNSLRAEDTAVYYCAKSYLSGTFDYWGQGTLVTVSS

SEQ ID NO: 984 - protein, 115 aa, synthetic construct
EVQLLESGGGLVQPGGSLRLSCAASGFTFSEYGMWWVRQAPGKGLEWVSEISPSGGYTYYADSVKGRFTISRDNSKNTLYLQMNSLRAEDTAVYYCASEQAGDYWGQGTLVTVSS

SEQ ID NO: 985 - protein, 118 aa, synthetic construct
EVQLLESGGGLVQPGGSLRLSCAASGFTFKDYGMNWVRQAPGKGLEWVSSIGANGAPTYYADSVKGRFTISRDNSKNTLYLQMNSLRAEDTAVYYCAKSYLSGTFDYWGQGTLVTVSS

SEQ ID NO: 986 - protein, 114 aa, synthetic construct
EVQLLESGGGLVQPGGSLRLSCAASGFTFSNYGMSWVRQAPGKGLEWVGISNSGSTSYNDSVKGRFTISRDNSKNTLYLQMNSLRAEDTAVYYCAKAGRKFDYWGQGTLVTVSS

SEQ ID NO: 987 - protein, 115 aa, synthetic construct
EVQLLESGGGLVQPGGSLRLSCAASGFTFSEYGMWWVRQAPGKGLEWVSEIDALGTDTYYADSVKGRFTISRDNSKNTLYLQMNSLRAEDTAVYYCASEQAGDYWGQGTLVTVSS

SEQ ID NO: 988 - protein, 117 aa, synthetic construct
EVQLLESGGGLVQPGGSLRLSCAASGYSISSGYHWAWVRQAPGKGLEWVSAISGSGGGTSYADSVKGRFTISRDNSKNTLYLQMNSLRAEDTAVYYCARGRLLFDYWGQGTLVTVSS

SEQ ID NO: 989 - protein, 123 aa, synthetic construct
QVQLVQSGAEVKKPGSSVKVSCKASGGSFSSYAISWVRQAPGQGLEWMGGIIPLNYAQKFQGRVTITADESTSTAYMELSSLRSEDTAVYYCARGVAYYDFWSGHFSDAFDVWGQGTLVTVSS

SEQ ID NO: 990 - protein, 121 aa, synthetic construct
EVQLLESGGGLVQPGGSLRLSCAASGFTFEQTDMHWVRQAPGKGLEWVSSISPNGWDTYYADSVKGRFTISRDNSKNTLYLQMNSLRAEDTAVYYCARAYSSGWSLPFDYWGQGTLVTVSS

SEQ ID NO: 991 - protein, 118 aa, synthetic construct
EVQLLESGGGLVQPGGSLRLSCAASGFTFKAYPIMWVRQAPGKGLEWVSGIYPSGGSTVYADSVKGRFTISRDNSKNTLYLQMNSLRAEDTAVYYCAKSRTGRYFDYWGQGTLVTVSS

SEQ ID NO: 992 - protein, 123 aa, synthetic construct
EVQLLESGGGLVQPGGSLRLSCAASGFTFNHYGMGWVRQAPGKGLEWVSIISPLGLSTYYADSVKGRFTISRDNSKNTLYLQMNSLRAEDTAVYYCAKYGETSGPISENFDYWGQGTLVTVSS

SEQ ID NO: 993 - protein, 118 aa, synthetic construct
EVQLLESGGGLVQPGGSLRLSCAASGFTFEQTDMHWVRQAPGKGLEWVSSISPNGWDTYYADSVKGRFAISRDNSKNTLYLQMNSLRAEDTAVYYCAKSRTGRYFDYWGQGTLVTVSS

SEQ ID NO: 994 - protein, 118 aa, synthetic construct
EVQLLESGGGLVQPGGSLRLSCAASGFTFNHYGMGWVRQAPGKGLEWVSSIRGSSSSTYYADSVKGRFTISRDNSKNTLYLQMNSLRAEDTAVYYCAKSYQAGTFDYWGQGTLVTVSS

SEQ ID NO: 995 - protein, 116 aa, synthetic construct
EVQLLESGGGLVQPGGSLRLSCAASGFTFEPVIMGWVRQAPGKGLEWVSSIRGSSSSTYYADSVKGRFTISRDNSKNTLYLQMNSLRAEDTAVYYCAKGLRAFDYWGQGTLVTVSS

SEQ ID NO: 996 - protein, 116 aa, synthetic construct
EVQLLESGGGLVQPGGSLRLSCAASGFTFSEYGMWWVRQAPGKGLEWVSEISPSGGYTYYADSVKGRFTISRDNSKNTLYLQMNSLRAEDTAVYYCAGSSGWSEYWGQGTLVTVSS

SEQ ID NO: 997 - protein, 116 aa, synthetic construct
EVQLLESGGGLVQPGGSLRLSCAASGFTFSSYFMSWVRQAPGKGLEWVSEISPSGSETYYADSVKGRFTISRDNSKNTLYLQMNSLRAEDTAVYYCAKGTTRFDYWGQGTLVTVSS

SEQ ID NO: 998 - protein, 120 aa, synthetic construct
EVQLLESGGGLVQPGGSLRLSCAASGFTFSEYGMWWVRQAPGKGLEWVSEISPSGSETYYADSVKGRFTISRDNSKNTLYLQMNSLRAEDTAVYYCAEQDVKGSSSFDYWGQGTLVTVSS

SEQ ID NO: 999 - protein, 118 aa, synthetic construct
QVQLVQSGAEVKKPGSSVKVSCKASGHTFNNYAISWVRQAPGQGLEWMGGIIPVNYAQKFQGRVTITADESTSTAYMELSSLRSEDTAVYYCAQWGIAAAGAFYFDSWGQGTLVTVSS

SEQ ID NO: 1000 - protein, 114 aa, synthetic construct
EVQLLESGGGLVQPGGSLRLSCAASGFTFSSYWNHWVRQAPGKGLEWVSTIGPSGTSTYYADSVKGRFTISRDNSKNTLYLQMNSLRAEDTAVYYCARDLGDYWGQGTLVTVSS

SEQ ID NO: 1001 - protein, 119 aa, synthetic construct
EVQLLESGGGLVQPGGSLRLSCAASGFTFSNYGMSWVRQAPGKGLEWVSIISPLGLSTYYADSVKGRFTISRDNSKNTLYLQMNSLRAEDTAVYYCAKGPSSTSPFDYWGQGTLVTVSS

SEQ ID NO: 1002 - protein, 116 aa, synthetic construct; identical to SEQ ID NO: 996

SEQ ID NO: 1003 - protein, 116 aa, synthetic construct
EVQLLESGGGLVQPGGSLRLSCAASGFTFSEYGMWWVRQAPGKGLEWVSEIDALGTDTYYADSVKGRFTISRDNSKNTLYLQMNSLRAEDTAVYYCATHAAAGDYWGQGTLVTVSS

SEQ ID NO: 1004 - protein, 118 aa, synthetic construct
EVQLLESGGGLVQPGGSLRLSCAASGFTFFPYAMGWVRQAPGKGLEWVSWISPHGALTYYADSVKGRFTISRDNSKNTLYLQMNSLRAEDTAVYYCAKSRTGRYFDYWGQGTLVTVSS

SEQ ID NO: 1005 - protein, 117 aa, synthetic construct
EVQLLESGGGLVQPGGSLRLSCAASGFTFSPYLMSWVRQAPGKGLEWVSAIIGSGSNTYYADSVKGRFTISRDNSKNTLYLQMNSLRAEDTAVYYCAKGSLRHFDYWGQGTLVTVSS

SEQ ID NO: 1006 - protein, 115 aa, synthetic construct; identical to SEQ ID NO: 984

SEQ ID NO: 1007 - protein, 116 aa, synthetic construct
EVQLLESGGGLVQPGGSLRLSCAASGFTFEQTDMHWVRQAPGKGLEWVSSISPNGWDTYYADSVKGRFTISRDNSKNTLYLQMNSLRAEDTAVYYCAKSFSFFDYWGQGTLVTVSS

SEQ ID NO: 1008 - protein, 116 aa, synthetic construct
EVQLLESGGGLVQPGGSLRLSCAASGFTFSSYWNHWVRQAPGKGLEWVSTIGPSGTSTYYADSVKGRFTISRDNSKNTLYLQMNSLRAEDTAVYYCAKGTTRFDYWGQGTLVTVSS

SEQ ID NO: 1009 - protein, 116 aa, synthetic construct
EVQLLESGGGLVQPGGSLRLSCAASGFTFEQTDMHWVRQAPGKGLEWVSSISPNGWDTYYADSVKGRFTISRDNSKNTLYLQMNSLRAEDTAVYYCAKGTTRFDYWGQGTLVTVSS

SEQ ID NO: 1010 - protein, 115 aa, synthetic construct; identical to SEQ ID NO: 987

SEQ ID NO: 1011 - protein, 116 aa, synthetic construct
EVQLLESGGGLVQPGGSLRLSCAASGFTFSSYFMSWVRQAPGKGLEWVSEISPSGSETYYADSVKGRFTISRDNSKNTLYLQMNSLRAEDTAVYYCARWTSGLDYWGQGTLVTVSS

SEQ ID NO: 1012 - protein, 120 aa, synthetic construct; identical to SEQ ID NO: 998

SEQ ID NO: 1013 - protein, 116 aa, synthetic construct
EVQLLESGGGLVQPGGSLRLSCAASGFTFPLYEMHWVRQAPGKGLEWVSIISGQGTVTYYADSVKGRFTISRDNSKNTLYLQMNSLRAEDTAVYYCAKSGTSFDYWGQGTLVTVSS

SEQ ID NO: 1014 - protein, 121 aa, synthetic construct
EVQLLESGGGLVQPGGSLRLSCAASGFIFQWYDMGWVRQAPGKGLEWVSSIRGSSSSTYYADSVKGRFTISRDNSKNTLYLQMNSLRAEDTAVYYCARAYSSGWSLPFDYWGQGTLVTVSS

SEQ ID NO: 1015 - protein, 121 aa, synthetic construct
EVQLLESGGGLVQPGGSLRLSCAASGFTFFPYAMGWVRQAPGKGLEWVSWISPHGALTYYADSVKGRFTISRDNSKNTLYLQMNSLRAEDTAVYYCARAYSSGWSLPFDYWGQGTLVTVSS

SEQ ID NO: 1016 - protein, 116 aa, synthetic construct
EVQLLESGGGLVQPGGSLRLSCAASGFTFPLYEIHWVRQAPGKGLEWVSSISGYGSTTYYADSVKGRFTISRDNSKNTLYLQMNSLRAEDTAVYYCAKGTTRFDYWGQGTLVTVSS

SEQ ID NO: 1017 - protein, 121 aa, synthetic construct
EVQLLESGGGLVQPGGSLRLSCAASGFTFPLYEMHWVRQAPGKGLEWVSIISPLGLSTYYADSVKGRFTISRDNSKNTLYLQMNSLRAEDTAVYYCARAYSSGWSLPFDYWGQGTLVTVSS

SEQ ID NO: 1018 - protein, 121 aa, synthetic construct
EVQLLESGGGLVQPGGSLRLSCAASGFTFSSAAMSWVRQAPGKGLEWVSGISPSGGITTYADSVKGRFTISRDNSKNTLYLQMNSLRAEDTAVYYCARIRVGPSGGAFDYWGQGTLVTVSS

SEQ ID NO: 1019 - protein, 114 aa, synthetic construct
EVQLLESGGGLVQPGGSLRLSCAASGFTFSSYFMSWVRQAPGKGLEWVSSIRGSSSSTYYADSVKGRFTISRDNSKNTLYLQMNSLRAEDTAVYYCARDLGDYWGQGTLVTVSS

SEQ ID NO: 1020 - protein, 118 aa, synthetic construct
EVQLLESGGGLVQPGGSLRLSCAASGFTFSSAAMSWVRQAPGKGLEWVSISDHGFNTYYADSVKGRFTISRDNSKNTLYLQMNSLRAEDTAVYYCARDRGGATTLDYWGQGTLVTVSS

SEQ ID NO: 1021 - protein, 116 aa, synthetic construct; identical to SEQ ID NO: 996

SEQ ID NO: 1022 - protein, 115 aa, synthetic construct
EVQLLESGGGLVQPGGSLRLSCAASGFTFGDHGMGWVRQAPGKGLEWVSWIEGRGTETYYADSVKGRFTISRDNSKNTLYLQMNSLRAEDTAVYYCARGRLFDYWGQGTLVTVSS

SEQ ID NO: 1023 - protein, 116 aa, synthetic construct
EVQLLESGGGLVQPGGSLRLSCAASGFMFSWYDMGWVRQAPGKGLEWVSSISSTGFKTYYADSVKGRFTISRDNSKNTLYLQMNSLRAEDTAVYYCALGGSYFGYWGQGTLVTVSS

SEQ ID NO: 1024 - protein, 116 aa, synthetic construct
EVQLLESGGGLVQPGGSLRLSCAASGFIFQWYDMGWVRQAPGKGLEWVSSIRGSSSSTYYADSVKGRFTISRDNSKNTLYLQMNSLRAEDTAVYYCAKGTTRFDYWGQGTLVTVSS

SEQ ID NO: 1025 - protein, 117 aa, synthetic construct
EVQLLESGGGLVQPGGSLRLSCAASGFTFGDHGMGWVRQAPGKGLEWVGVIWGGGGTYYADSVKGRFTISRDNSKNTLYLQMNSLRAEDTAVYYCAKSRTGRYFDYWGQGTLVTVSS

SEQ ID NO: 1026 - protein, 118 aa, synthetic construct
EVQLLESGGGLVQPGGSLRLSCAASGFTFSSYWNHWVRQAPGKGLEWVSSINDRGDQTYYADSVKGRFTISRDNSKNTLYLQMNSLRAEDTAVYYCAKGSLSSGWDYWGQGTLVTVSS

SEQ ID NO: 1027 - protein, 118 aa, synthetic construct
EVQLLESGGGLVQPGGSLRLSCAASGFTFPLYEMHWVRQAPGKGLEWVSIISPLGLSTYYADSVKGRFTISRDNSKNTLYLQMNSLRAEDTAVYYCAKSRTGRYFDYWGQGTLVTVSS

SEQ ID NO: 1028 - protein, 117 aa, synthetic construct
EVQLLESGGGLVQPGGSLRLSCAASGFTFEQTDMHWVRQAPGKGLEWVSSISPNGWDTYYADSVKGRFTISRDNSKNTLYLQMNSLRAEDTAVYYCARSYGGGFDYWGQGTLVTVSS

SEQ ID NO: 1029 - protein, 120 aa, synthetic construct
EVQLLESGGGLVQPGGSLRLSCAASGFTFGDHGMGWVRQAPGKGLEWVGVIWGGGGTYYADSVKGRFTISRDNSKNTLYLQMNSLRAEDTAVYYCARAYSSGWSLPFDYWGQGTLVTVSS

SEQ ID NO: 1030 - protein, 117 aa, synthetic construct
EVQLLESGGGLVQPGGSLRLSCAASGFTFNHYGMGWVRQAPGKGLEWVSGITRSGSTNYRDSVKGRFTISRDNSKNTLYLQMNSLRAEDTAVYYCAKSYLSGTFDYWGRGTLVTVSS

SEQ ID NO: 1031 - protein, 116 aa, synthetic construct
EVQLLESGGGLVQPGGSLRLSCAASGFTFGDYDMWWVRQAPGKGLEWVSEISPSGGYTYYADSVKGRFTISRDNSKNTLYLQMNSLRAEDTAVYYCAGSSGWSEYWGQGTLVTVSS

SEQ ID NO: 1032 - protein, 118 aa, synthetic construct
EVQMLESGGGLVQPGGSLRLSCAASGFTFEQTDMHWVRQAPGKGLEWVSSISPNGWDTYYADSVKGRFTISRDNSKNTLYLQMNSLRAEDTAVYYCAKSTPNIPLAYWGQGTLVTVSS

SEQ ID NO: 1033 - protein, 118 aa, synthetic construct
EVQLLESGGGLVQPGGSLRLSCAASGFTFSSYWNHWVRQAPGKGLEWVSEISPSGSETYYADSVKGRFTISRDNSKNTLYLQMNSLRAEDTAVYYCATAEEIPGYDYWGQGTLVTVSS

SEQ ID NO: 1034 - protein, 116 aa, synthetic construct
EVQLLESGGGLVQPGGSLRLSCAASGFTFNAYPMTWVRQAPGKGLEWVSVISGSGGRTNYADSVKGRFTISRDNSKNTLYLQMNSLRAEDTAVYYCAKGTTRFDYWGQGTLVTVSS

SEQ ID NO: 1035 - protein, 116 aa, synthetic construct
EVQLLESGGGLVQPGGSLRLSCAASGFTFSPYPMMWVRQAPGKGLEWVSGIAHNGRNTYYADSVKGRFTISRDNSKNTLYLQMNSLRAEDTAVYYCAKGWRRFDYWGQGTLVTVSS

SEQ ID NO: 1036 - protein, 116 aa, synthetic construct
EVQLLESGGGLVQPGGSLRLSCAASGFTFEPVIMGWVRQAPGKGLEWVSGIYPSGGSTVYADSVKGRFTISRDNSKNTLYLQMNSLRAEDTAVYYCAKLGRRFDYWGQGTLVTVSS

SEQ ID NO: 1037 - protein, 116 aa, synthetic construct
EVQLLESGGGLVQPGGSLRLSCAASGFTFPLYEMHWVRQAPGKGLEWVSIISPLGLSTYYADSVKGRFTISRDNSKNTLYLQMNSLRAEDTAVYYCAKGTTRFDYWGQGTLVTVSS

SEQ ID NO: 1038 - protein, 116 aa, synthetic construct
EVQLLESGGGLVQPGGSLRLSCAASGFTSNNFAMTWVRQAPGKGLEWVSSIRGSSSSTYYADSVKGRFTISRDNSKNTLYLQMNSLRAEDTAVYYCAKGFRIFDYWGQGTLVTVSS

SEQ ID NO: 1039 - protein, 120 aa, synthetic construct
EVQLLESGGGLVQPGGSLRLSCAASGFTFSNYGVSWVRQAPGKGLEWVSIISPLGLSTYYADSVKGRFTISRDNSKNTLYLQMNSLRAEDTAVYYCARGSYIIWSALDYWGQGTLVTVSS

SEQ ID NO: 1040 - protein, 118 aa, synthetic construct
EVQLLESGGGLVQPGGSLRLSCAASGFTFFPYAMGWVRQAPGKGLEWVSWISPHGALTYYADSVKGRFTISRDNSKNTLYLQMNSLRAEDTAVYYCAKSTPNIPLAYWGQGTLVTVSS

SEQ ID NO: 1041 - protein, 116 aa, synthetic construct
EVQLLESGGGLVQPGGSLRLSCAASGSTFAGYEVWWVRQAPGKGLEWVSEISPSGGYTYYADSVKGRFTISRDNSKNTLYLQMNSLRAEDTAVYYCATHAAAGDYWGQGTLVTVSS

SEQ ID NO: 1042 - protein, 123 aa, synthetic construct; identical to SEQ ID NO: 992

SEQ ID NO: 1043 - protein, 117 aa, synthetic construct
EVQLLESGGGLVQPGGSLRLSCAASGFTFPLYEMHWVRQAPGKGLEWVSIISPLGLSTYYADSVKGRFTISRDNSKNTLYLQMNSLRAEDTAVYYCARWSSRAFDYWGQGTLVTVSS

SEQ ID NO: 1044 - protein, 118 aa, synthetic construct
EVQLLESGGGLVQPGGSLRLSCAASGFTFHKYGMAWVRQAPGKGLEWVSAISGSGGRPNYADSVKGRFTISRDNSKNTLYLQMNSLRAEDTAVYYCAKSTPNIPLAYWGQGTLVTVSS

SEQ ID NO: 1045 - protein, 117 aa, synthetic construct
EVQLLESGGGLVQPGGSLRLSCAASGFTFEQTDMHWVRQAPGKGLEWVSSISPNGWDTYYADSVKGRFTISRDNSKNTLYLQMNSLRAEDTAVYYCAKAYYGGFDYWGQGTLVTVSS

SEQ ID NO: 1046 - protein, 121 aa, synthetic construct
EVQLLESEGGLVQPGGSLRLSCAASGFTFSGYDMQWVRQAPGKGLEWVSSISSTGFKTYYADSVKGRFTISRDNSKNTLYLQMNSLRAEDTAVYYCARAYSSGWSLPFDYWGQGTLVTVSS

SEQ ID NO: 1047 - protein, 118 aa, synthetic construct
EVQLLESGGGLVQPGGSLRLSCAASGFIFQWYDMGWVRQAPGKGLEWVSSIRGSSSSTYYADSVKGRFTISRDNSKNTLYLQMNSLRAEDTAVYYCAKSTPNIPLAYWGQGTLVTVSS

SEQ ID NO: 1048 - protein, 123 aa, synthetic construct
EVQLLESGGGLVQPGGSLRLSCAASGFTFSSYWNHWVRQAPGKGLEWVSTIGPSGTSTYYADSVKGRFTISRDNSKNTLYLQMNSLRAEDTAVYYCARHPIYSGNYQGYFDYWGQGTLVTVSS

SEQ ID NO: 1049 - protein, 116 aa, synthetic construct; identical to SEQ ID NO: 996

SEQ ID NO: 1050 - protein, 118 aa, synthetic construct
EVQLLESGGGLVQPGGSLRLSCAASGFTFSSAAMSWVRQAPGKGLEWVSGISPSGGITTYADSVKGRFTISRDNSKNTLYLQMNSLRAEDTAVYYCAKSTPNIPLAYWGQGTLVTVSS

SEQ ID NO: 1051 - protein, 116 aa, synthetic construct
EVQLLESGGGLVQPGGSLRLSCAASGSTFAGYEVWWVRQAPGKGLEWVSEISPSGEYTYYADSVKGRFTISRDNSKNTLYLQMNSLRAEDTAVYYCAKSNGRFDYWGQGTLVTVSS

SEQ ID NO: 1052 - protein, 118 aa, synthetic construct
EVQLLESGGGLVQPGGSLRLSCAASGFTFPLYEMHWVRQAPGKGLEWVSIISPLGLSTYYADSVKGRFTISRDNSKNTLYLQMNSLRAEDTAVYYCAKGNSRYVFDYWGQGTLVTVSS

SEQ ID NO: 1053 - protein, 116 aa, synthetic construct
EVQLLESGGGLVQPGGSLRLSCAASGFTFEQTDMHWVRQAPGKGLEWVSSISPNGWDTYYADSVKGRFTISRDNSKNTLYLQMNSLRAEDTAVYYCAGSSGWSEYWGQGTLVTVSS

SEQ ID NO: 1054 - protein, 118 aa, synthetic construct; identical to SEQ ID NO: 985

SEQ ID NO: 1055 - protein, 116 aa, synthetic construct; identical to SEQ ID NO: 981

SEQ ID NO: 1056 - protein, 117 aa, synthetic construct
EVQLLESGGGLVQPGGSLRLSCAASGFTFFPYAMGWVRQAPGKGLEWVSWISPHGALTYYADSVKGRFTISRDNSKNTLYLQMNSLRAEDTAVYYCARSYGGGFDYWGQGTLVTVSS

SEQ ID NO: 1057 - protein, 117 aa, synthetic construct
EVQLLESGGGLVQPGGSLRLSCAASGFTFPLYEMHWVRQAPGKGLEWVSIISPLGLSTYYADSVKGRFTISRDNSKNTLYLQMNSLRAEDTAVYYCARSYGGGFDYWGQGTLVTVSS

SEQ ID NO: 1058 - protein, 120 aa, synthetic construct
EVQLLESGGGLVQPGGSLRLSCAASGFTFNHYGMGWVRQAPGKGLEWVSIISPLGLSTYYADSMKGRFTISRDNSKNTLYLQMNSLRAEDTAVYYCARSGVGATKIFDYWGQGTLVTVSS

SEQ ID NO: 1059 - protein, 124 aa, synthetic construct
EVQLLESGGGLVQPGGSLRLSCAASGFTFSSAAMSWVRQAPGKGLEWVSAISGSGGNTYYADSVKGRFTISRDNSKNTLYLQMNSLRAEDTAVYYCAKAGPPFAGSRGNSFDYWGQGTLVTVSS

SEQ ID NO: 1060 - protein, 116 aa, synthetic construct
EVQLLESGGGLVQPGGSLRLSCAASGFTFSSYWNHWVRQAPGKGLEWVSTIGPSGTSTYYADSVKGRFTISRDNSKNTLYLQMNSLRAEDTAVYYCAKSYGAFDYWGQGTLVTVSS

SEQ ID NO: 1061 - protein, 116 aa, synthetic construct
EVQLLESGGGLVQPGGSLRLSCAASGFTFSSYFMSWVRQAPGKGLEWVSEISPSGSETYYADSVKGRFTISRDNSKNTLYLQMNSLRAEDTAVYYCARGRLLFDYWGQGTLVTVSS

SEQ ID NO: 1062 - protein, 116 aa, synthetic construct
EVQLLESGGGLVQPGGSLRLSCAASGFTFSNSYISWVRQAPGKGLEWVSSISNSGGSTYYADSVKGRFTISRDNSKNTLYLQMNSLRAEDTAVYYCAKNGITFDYWGQGTLVTVSS

SEQ ID NO: 1063 - protein, 114 aa, synthetic construct; identical to SEQ ID NO: 978

SEQ ID NO: 1064 - protein, 118 aa, synthetic construct
EVQLLESGGGLVQPGGSLRLSCAASGFTFNHYGMGWVRQAPGKGLEWVSAISGSGDKTYYADSVKGRFTISRDNSKNTLYLQMNSLRAEDTAVYYCAKSYLSGTFDYWGQGTLVTVSS

SEQ ID NO: 1065 - protein, 118 aa, synthetic construct
EVQLLESGGGLVQPGGSLRLSCAASGFTFSSYWNHWVRQAPGKGLEWVSTIGPSGTSTYYADSVKGRFTISRDNSKNTLYLQMNSLRAEDTAVYYCAKAVRNFAFDYWGQGTLVTVSS

SEQ ID NO: 1066 - protein, 117 aa, synthetic construct
EVQLLESGGGLVQPGGSLRLSCAASGFTFGDHGMGWVRQAPGKGLEWVGVIWGGGGTYYADSVKGRFTISRDNSKNTLYLQMNSLRAEDTAVYYCAKSTPNIPLAYWGQGTLVTVSS

SEQ ID NO: 1067 - protein, 116 aa, synthetic construct
EVQLLESGGGLVQPGGSLRLSCAASGFTFEQTDMHWVRQAPGKGLEWVSSISPNGWDTYYADSVKGRFTISRDNSKNTLYLQMNSLRAEDTAVYYCAKSGTDFDYWGQGTLVTVSS

SEQ ID NO: 1068 - protein, 114 aa, synthetic construct
EVQLLESGGGLVQPGGSLRLSCAASGFTFEQTDMHWVRQAPGKGLEWVSSISPNGWDTYYADSVKGRFTISRDNSKNTLYLQMNSLRAEDTAVYYCARDLGDYWGQGTLVTVSS

SEQ ID NO: 1069 - protein, 114 aa, synthetic construct
EVQLLESGGGLVQPGGSLRLSCAASGFTVDTYAMTWVRQAPGKGLEWVSGITRSGSTNYRDSVKGRFTISRDNSKNTLYLQMNSLRAEDTAVYYCAKGSGFDYWGQGTLVTVSS

SEQ ID NO: 1070 - protein, 117 aa, synthetic construct
EVQLLESGGGLVQPGGSLRLSCAASGFTFNHYGMGWVRQAPGKGLEWVSGITRSGSTNYRDSVKGRFTISRDNSKNTLYLQMNSLRAEDTAVYYCAKSTPNIPLAYWGQGTLVTVSS

SEQ ID NO: 1071 - protein, 115 aa, synthetic construct; identical to SEQ ID NO: 987

SEQ ID NO: 1072 - protein, 118 aa, synthetic construct
EVQLLESGGGLVQPGGSLRLSCAASGFTFNHYGMGWVRQAPGKGLEWVSAISGSGGGTSYADSVKGRFTISRDNSKNTLYLQMNSLRAEDTAVYYCAKSYLSGTFDYWGQGTLVTVSS

SEQ ID NO: 1073 - protein, 120 aa, synthetic construct
EVQLLESGGGLVQPGGSLRLSCAASGFAFRSYAMSWVRQAPGKGLEWVSAITGSGTSTYYADSVKGRFTISRDNSKNTLYLQMNSLRAEDTAVYYCARDILWNYRVADYWGQGTLVTVSS

SEQ ID NO: 1074 - protein, 130 aa, synthetic construct
EVQLLESGGGLVQPGGSLRLSCAASGFTFTSHAMSWVRQAPGKGLEWVSGISGSGANTYYADSVKGRFTISRDNSKNTLYLQMNSLRAEDTAVYYCARDGIVVVPAANHSYYYYYGMDVWGQGTLVTVSS

SEQ ID NO: 1075 - protein, 122 aa, synthetic construct
EVQLLESGGGLVQPGGSLRLSCAASGFTFSNFAMSWVRQAPGKGLEWVSTISGSGGSTSYADSVKGRFTISRDNSKNTLYLQMNSLRAEDTAVYYCAREKRSSGWYPHFDYWGQGTLVTVSS

SEQ ID NO: 1076 - protein, 125 aa, synthetic construct
EVQLLESGGGLVQPGGSLRLSCAASGFTLSDYAMSWVRQAPGKGLEWVSTISGSAGSTYYADSVKGRFTISRDNSKNTLYLQMNSLRAEDTAVYYCARGRTPTTVTTKNDAFDIWGQGTLVTVSS

SEQ ID NO: 1077 - protein, 116 aa, synthetic construct
EVQLLESGGGLVQPGGSLRLSCAASGFPLSSYAMSWVRQAPGKGLEWVSLISGSGVSTYYADSVKGRFTISRDNSKNTLYLQMNSLRAEDTAVYYCARGWGAAEEWGQGTLVTVSS

SEQ ID NO: 1078 - protein, 118 aa, synthetic construct
EVQLLESGGGLVQPGGSLRLSCAASGFTFGSYTMNWVRQAPGKGLEWVSGISASGGNTYYADSVKGRFTISRDNSKNTLYLQMNSLRAEDTAVYYCAKAMKLWPFDYWGQGTLVTVSS

SEQ ID NO: 1079 - protein, 116 aa, synthetic construct
EVQLLESGGGLVQPGGSLRLSCAASGFTFTKYAMSWVRQAPGKGLEWVSGISGSGGYTYYADSVKGRFTISRDNSKNTLYLQMNSLRAEDTAVYYCARGAGSPDYWGQGTLVTVSS

SEQ ID NO: 1080 - protein, 120 aa, synthetic construct
EVQLLESGGGLVQPGGSLRLSCAASGFAFRSYAMSWVRQAPGKGLEWVSAITGSGTSTYYADSVKGRFTISRDNSKNTLYLQMNSLRAEDTAVYYCARDILWNYHVADYWGQGTLVTVSS

SEQ ID NO: 1081 - protein, 125 aa, synthetic construct
EVQLLESGGGLVQPGGSLRLSCAASGFTFSSYSMNWVRQAPGKGLEWVSLISSSGGSTYYADSVKGRFTISRDNSKNTLYLQMNSLRAEDTAVYYCARKRVPAAITKEHDAFDIWGQGTLVTVSS

SEQ ID NO: 1082 - protein, 118 aa, synthetic construct
EVQLLESGGGLVQPGGSLRLSCAASGLTFNNYAMSWVRQAPGKGLEWVSGISGSSGNTYYVDSVKGRFTISRDNSKNTLYLQMNSLRAEDTAVYYCARGPNHGMFDAWGQGTLVTVSS

SEQ ID NO: 1083 - protein, 120 aa, synthetic construct
EVQLLESGGGLVQPGGSLRLSCAASGFTISNYAMSWVRQAPGKGLEWVSGISGSGSSTFYADSVKGRFTISRDNSKNTLYLQMNSLRAEDTAVYYCAKPDSGQWWGVDQWGQGTLVTVSS

SEQ ID NO: 1084 - protein, 116 aa, synthetic construct; identical to SEQ ID NO: 1077

SEQ ID NO: 1085 - protein, 120 aa, synthetic construct
EVQLLESGGGLVQPGGSLRLSCAASGFSFTTYAMSWVRQAPGKGLEWVSGISGGGGSTYYADSVKGRFTISRDNSKNTLYLQMNSLRAEDTAVYYCAKLVLSNRGGVDYWGQGTLVTVSS

SEQ ID NO: 1086 - protein, 120 aa, synthetic construct
EVQLLESGGGLVQPGGSLRLSCAASGFIFSNFAMSWVRQAPGKGLEWVSGISGSGSSTNYADSVKGRFTISRDNSKNTLYLQMNSLRAEDTAVYYCARGFWSGYYGMDVWGQGTLVTVSS

SEQ ID NO: 1087 - protein, 117 aa, synthetic construct
EVQLLESGGGLVQPGGSLRLSCAASGFTFRSHAMSWVRQAPGKGLEWVSALSGSGGRTYYADSVKGRFTISRDNSKNTLYLQMNSLRAEDTAVYYCASSGAGVSDYWGQGTLVTVSS

SEQ ID NO: 1088 - protein, 122 aa, synthetic construct
EVQLLESGGGLVQPGGSLRLSCAASGFTFPSYAMAWVRQAPGKGLEWVSAISGSGSSPYYADSVKGRFTISRDNSKNTLYLQMNSLRAEDTAVYYCAREKRSSGWYPHFDYWGQGTLVTVSS

SEQ ID NO: 1089 - protein, 122 aa, synthetic construct
EVQLLESGGGLVQPGGSLRLSCAASGFIFSRYAMSWVRQAPGKGLEWVSAISESGGNTYYADSVKGRFTISRDNSKNTLYLQMNSLRAEDTAVYYCARQRYPGGSGSYADYWGQGTLVTVSS

SEQ ID NO: 1090 - protein, 120 aa, synthetic construct
EVQLLESGGGLVQPGGSLRLSCAASGFTFSGYAMNWVRQAPGKGLEWVSTISGSGVSTYYADSVKGRFTISRDNSKNTLYLQMNSLRAEDTAVYYCAREQHLVEGDFDNWGQGTLVTVSS

SEQ ID NO: 1091 - protein, 116 aa, synthetic construct; identical to SEQ ID NO: 1077

SEQ ID NO: 1092 - protein, 116 aa, synthetic construct; identical to SEQ ID NO: 1077

SEQ ID NO: 1093 - protein, 120 aa, synthetic construct; identical to SEQ ID NO: 1090

SEQ ID NO: 1094 - protein, 125 aa, synthetic construct
EVQLLESGGGLVQPGGSLRLSCAASGITFSNYAVSWVRQAPGKGLEWVSSISGSAGSTYYADSVKGRFTISRDNSKNTLYLQMNSLRAEDTAVYYCAKDRVPGTVTGRPDAFDIWGQGTLVTVSS

SEQ ID NO: 1095 - protein, 125 aa, synthetic construct; identical to SEQ ID NO: 1094

SEQ ID NO: 1096 - protein, 124 aa, synthetic construct
EVQLLESGGGLVQPGGSLRLSCAASGFTFSSYSMNWVRQAPGKGLEWVSISSSGGSTYYADSVKGRFTISRDNSKNTLYLQMNSLRAEDTAVYYCARKRVPAAITKEHDAFDIWGQGTLVTVSS

SEQ ID NO: 1097 - protein, 118 aa, synthetic construct
EVQLLESGGGLVQPGGSLRLSCAASGFTFSSYAMSWVRQAPGKGLEWVSVISGSGGRTDYADSVKGRFTISRDNSKNTLYLQMNSLRAEDTAVYYCARFSLSAAFDIWGQGTLVTVSS

SEQ ID NO: 1098 - protein, 120 aa, synthetic construct
EVQLLESGGGLVQPGGSLRLSCAASGFTFTNHAMSWVRQAPGKGLEWVSGISGSGRSTYYADSVKGRFTISRDNSKNTLYLQMNSLRAEDTAVYYCARSGLRRLATFDYWGQGTLVTVSS

SEQ ID NO: 1099 - protein, 122 aa, synthetic construct
EVQLLESGGGLVQPGGSLRLSCAASGFSFINYAMSWVRQAPGKGLEWVSAISGSGSSPYYADSVKGRFTISRDNSKNTLYLQMNSLRAEDTAVYYCAREKRSSGWYPHFDYWGQGTLVTVSS

SEQ ID NO: 1100 - protein, 119 aa, synthetic construct
EVQLLESGGGLVQPGGSLRLSCAASGITFSNYAVSWVRQAPGKGLEWVSSISGSGSSTYHADSVKGRFTISRDNSKNTLYLQMNSLRAEDTAVYYCARTVPGTYSFNYWGQGTLVTVSS

SEQ ID NO: 1101 - protein, 120 aa, synthetic construct
EVQLLESGGGLVQPGGSLRLSCAASGFTISNYAMSWVRQAPGKRLEWVSGISGSGSSTFYADSVKGRFTISRDNSKNTLYLQMNSLRAEDTAVYYCAKPDSGQWWGVDQWGQGTLVTVSS

SEQ ID NO: 1102 - protein, 120 aa, synthetic construct
EVQLLESGGGLVQPGGSLRLSCAASGFAFSRYAMAWVRQAPGKGLEWVSVISGGGGSTDYADSVKGRFTISRDNSKNTLYLQMNSLRAEDTAVYYCARFGALAAFAADYWGQGTLVTVSS

SEQ ID NO: 1103 - protein, 118 aa, synthetic construct
EVQLLESGGGLVQPGGSLRLSCAASGFTVSSSAMSWVRQAPGKGLEWVSGISGSGGSTDYADSVKGRFTISRDNSKNTLYLQMNSLRAEDTAVYYCAKRDGYNSERDWGQGTLVTVSS

SEQ ID NO: 1104 - protein, 122 aa, synthetic construct
EVQLLESGGGLVQPGGSLRLSCAASGFTFNKYAMSWVRQAPGKGLEWVSSIGGSGGTTYYADSVKGRFTISRDNSKNTLYLQMNSLRAEDTAVYYCARGRFSSGWPHDFDIWGQGTLVTVSS

SEQ ID NO: 1105 - protein, 122 aa, synthetic construct; identical to SEQ ID NO: 1099

SEQ ID NO: 1106 - protein, 117 aa, synthetic construct
EVQLLESGGGLVQPGGSLRLSCAASGFTFRSHAMSWVRQAPGKGLEWVSALSGSGGRTYYADSVKGRFTIPRDNSKNTLYLQMNSLRAEDTAVYYCASSGAGVSDYWGQGTLVTVSS

SEQ ID NO: 1107 - protein, 122 aa, synthetic construct
EVQLLESGGGLVQPGGSLRLSCAASGFAFRSYAMSWVRQAPGKGLEWVSAITGSGTSTYYADSVKGRFTISRDNSKNTLYLQMNSLRAEDTAVYYCAREKRSSGWYPHFDYWGQGTLVTVSS

SEQ ID NO: 1108 - protein, 120 aa, synthetic construct
EVQLLESGGGLVQPGGSLRLSCAASGFTFGRYAMTWVRQAPGKGLEWVSTISGSGGTTHYADSVKGRFTISRDNSKNTLYLQMNSLRAEDTAVYYCARTPAARFDAFDIWGQGTLVTVSS

SEQ ID NO: 1109 - protein, 125 aa, synthetic construct
EVQLLESGGGLVQPGGSLRLSCAASGLTFSTYAMSWVRQAPGKGLEWVSTITGSGGSTYYADSVKGRFTISRDNSKNTLYLQMNSLRAEDTAVYYCAKDRVPGTVTGRPDAFDIWGQGTLVTVSS

SEQ ID NO: 1110 - protein, 116 aa, synthetic construct
EVQLLESGGGLVQPGGSLRLSCAASGFTLSDYAMSWVRQAPGKGLEWVSTISGSAGSTYYADSVKGRFTISRDNSKNTLYLQMNSLRAEDTAVYYCARGWGAAEEWGQGTLVTVSS

SEQ ID NO: 1111 - protein, 125 aa, synthetic construct; identical to SEQ ID NO: 1094

SEQ ID NO: 1112 - protein, 125 aa, synthetic construct
EVQLLESGGGLVQPGGSLRLSCAASGFTLSSYAMTWVRQAPGKGLEWVSGISGSGGSTDYADSVKGRFTISRDNSKNTLYLQMNSLRAEDTAVYYCARKRVPAAITKEHDAFDIWGQGTLVTVSS

SEQ ID NO: 1113 - protein, 127 aa, synthetic construct
EVQLLESGGGLVQPGGSLRLSCAASGFAFSRYAMSWVRQAPGKGLEWVSAISSSGSSTYYADSVKGRFTISRDNSKNTLYLQMNSLRAEDTAVYYCARVIGYYDSSGYYSHDAFDIWGQGTLVTVSS

SEQ ID NO: 1114 - protein, 120 aa, synthetic construct
EVQLLESGGGLVQPGGSLRLSCAASGFTLSDYAMSWVRQAPGKGLEWVSTISGSAGSTYYADSVKGRFTISRDNSKNTLYLQMNSLRAEDTAVYYCARDILWNYRVADYWGQGTLVTVSS

SEQ ID NO: 1115 - protein, 119 aa, synthetic construct
EVQLLESGGGLVQPGGSLRLSCAASGFTFSNYAMSWVRQAPGKGLEWVSAISGSGGSTYYPDSVKGRFTISRDNSKNTLYLQMNSLRAEDTAVYYCARLTRGPWHFDLWGQGTLVTVSS

SEQ ID NO: 1116 - protein, 122 aa, synthetic construct
EVQLLESGGGLVQPGGSLRLSCAASGFAFSSYGMSWVRQAPGKGLEWVSGISGSGGNTFYADSVKGRFTISRDNSKNTLYLQMNSLRAEDTAVYYCAREKRSSGWYPHFDYWGQGTLVTVSS

SEQ ID NO: 1117 - protein, 119 aa, synthetic construct
EVQLLESGGGLVQPGGSLRLSCAASGFIFSNYAMSWVRQAPGKGLEWVSVISGSGGRTDYADSVKGRFTISRDNSKNTLYLQMNSLRAEDTAVYYCARHGVGSAGMDVWGQGTLVTVSS

SEQ ID NO: 1118 - protein, 124 aa, synthetic construct
EVQLLESGGGLVQPGGSLRLSCAASGFMFSDYAMSWVRQAPGKGLEWVSLTSGSGSNTYYADSVKGRFTISRDNSKNTLYLQMNSLRAEDTAVYYCARGHNDFLAGYSDYFDYWGQGTLVTVSS

SEQ ID NO: 1119 - protein, 125 aa, synthetic construct; identical to SEQ ID NO: 1094

SEQ ID NO: 1120 - protein, 130 aa, synthetic construct
EVQLLESGGGLVQPGGSLRLSCAASGITFSSSAMSWVRQAPGKGLEWVSGISGSGGRTNYADSVKGRFTISRDNSKNTLYLQMNSLRAEDTAVYYCARDITHYYGSGSSFYYYYSAMDVWGQGTLVTVSS

SEQ ID NO: 1121 - protein, 119 aa, synthetic construct
EVQLLESGGGLVQPGGSLRLSCAASGFTFGNYAMSWVRQAPGKGLEWVSVISGSGGRTDYADSVKGRFTISRDNSKNTLYLQMNSLRAEDTAVYYCAKGGIGSIGLHYWGQGTLVTVSS

SEQ ID NO: 1122 - protein, 119 aa, synthetic construct
EVQLLESGGGLVQPGGSLRLSCAASGFALSSYAMSWVRQAPGKRLEWVSAISGSGGSTSYADSVKGRFTISRDNSKNTLYLQMNSLRAEDTAVYYCAKHIGGWYTWDFWGQGTLVTVSS

SEQ ID NO: 1123 - protein, 118 aa, synthetic construct
EVQLLESGGGLVQPGGSLRLSCAASGFTFRSSAMSWVRQAPGKGLEWVSAISGSGTNTYYVDSVKGRFTISRDNSKNTLYLQMNSLRAEDTAVYYCVKDLGIGDSDYWGQGTLVTVSS

SEQ ID NO: 1124 - protein, 121 aa, synthetic construct
EVQLLESGGGLVQPGGSLRLSCAASGFIFRSYAMSWVRQAPGKGLEWVSVISGSGGRTDYADSVKGRFTISRDNSKNTLYLQMNSLRAEDTAVYYCARMKAAAGTISFDYWGQGTLVTVSS

SEQ ID NO: 1125 - protein, 121 aa, synthetic construct
EVQLLESGGGLVQPGGSLRLSCAASGFTISSSAMNWVRQAPGKGLEWVSAISGSGSGTYYTDSVKGRFTISRDNSKNTLYLQMNSLRAEDTAVYYCGRREGGRYNDAFDIWGQGTLVTVSS

SEQ ID NO: 1126 - protein, 116 aa, synthetic construct
EVQLLESGGGLVQPGGSLRLSCAASGFTFRSHAMSWVRQAPGKGLEWVSALSGSGGRTYYADSVKGRFTISRDNSKNTLYLQMNSLRAEDTAVYYCARGWGAAEEWGQGTLVTVSS

SEQ ID NO: 1127 - protein, 127 aa, synthetic construct
EVQLLESGGGLVQPGGSLRLSCAASGFTLTNYAMSWVRQAPGKGLEWVSSIRGSGGSTHYVDSVKGRFTISRDNSKNTLYLQMNSLRAEDTAVYYCARVIGYYDSSGYYSHDAFDIWGQGTLVTVSS

SEQ ID NO: 1128 - protein, 119 aa, synthetic construct
EVQLLESGGGLVQPGGSLRLSCAASGLTFSNFAMSWVRQAPGKGLEWVSHISGRGGSTFYADSVKGRFTISRDNSKNTLYLQMNSLRAEDTAVYYCARGGRIWWALDVWGQGTLVTVSS

SEQ ID NO: 1129 - protein, 120 aa, synthetic construct
EVQLLESGGGLVQPGGSLRLSCAASGFTFDTYAMTWVRQAPGKGLEWVSTISGSGGSAYYADSVKGRFTISRDNSKNTLYLQMNSLRAEDTAVYYCARLRHWGSAAFEIWGQGTLVTVSS

SEQ ID NO: 1130 - protein, 120 aa, synthetic construct; identical to SEQ ID NO: 1090

SEQ ID NO: 1131 - protein, 120 aa, synthetic construct
EVQLLESGGGLVQPGGSLRLSCAASGFTLSDYAMSWVRQAPGKGLEWVSTISGSAGSTYYADSVKGRFTISRDNSKNTLYLQMNSLRAEDTAVYYCARAHDYDSMLMDYWGQGTLVTVSS

SEQ ID NO: 1132 - protein, 117 aa, synthetic construct
EVQLLESGGGLVQPGGSLRLSCAASGFTFGTYVMSWVRQAPGKGLEWVSSITGSGGTTYYADSVKGRFTISRDNSKNTLYLQMNSLRAEDTAVYYCARGRQTGFDYWGQGTLVTVSS

SEQ ID NO: 1133 - protein, 125 aa, synthetic construct
EVQLLESGGGLVQPGGSLRLSCAASGFPFGSYAMNWVRQAPGKGLEWVSAIGGSGGSTYYADSVKGRFTISRDNSKNTLYLQMNSLRAEDTAVYYCARKRVPTTVTTQTDAFDIWGQGTLVTVSS

SEQ ID NO: 1134 - protein, 122 aa, synthetic construct
EVQLLESGGGLVQPGGSLRLSCAASGFTFRSHAMSWVRQAPGKGLEWVSAISGSGSSPYYADSVKGRFTISRDNSKNTLYLQMNSLRAEDTAVYYCAREKRSSGWYPHFDYWGQGTLVTVSS

SEQ ID NO: 1135 - protein, 120 aa, synthetic construct
EVQLLESGGGLVQPGGSLRLSCAASGFAFSSYAMNWVRQAPGKGLEWVSAISGGGGGTYYADSVKGRFTISRDNSKNTLYLQMNSLRAEDTAVYYCARHNYGDYYGMDVWGQGTLVTVSS

SEQ ID NO: 1136 - protein, 117 aa, synthetic construct
EVQLLESGGGLVQPGGSLRLSCAASGFTFRSHAMSWVRQAPGKGLEWVSALSGSGGRTYYADSVKGRFTISRDNSKNTLYLQMNSLRAEDTAVDYCASSGAGVSDYWGQGTLVTVSS

SEQ ID NO: 1137 - protein, 120 aa, synthetic construct; identical to SEQ ID NO: 1090

SEQ ID NO: 1138 - protein, 127 aa, synthetic construct
EVQLLESGGGLVQPGGSLRLSCAASGFTFRDYAMTWVRQAPGKGLEWVSSISESGGSTYYADSVKGRFTISRDNSKNTLYLQMNSLRAEDTAVYYCARLDAIKYSYGYYYYYGMDVWGQGTLVTVSS

SEQ ID NO: 1139 - protein, 125 aa, synthetic construct; identical to SEQ ID NO: 1112

SEQ ID NO: 1140 - protein, 117 aa, synthetic construct
EVQLLESGGGLVQPGGSLRLSCAASGFTFSNYGMNWVRQAPGKGLEWVSGISGSGGSTDYADSVKGRFTISRDNSKNTLYLQMNSLRAEDTAVYYCARVGATPFDYWGQGTLVTVSS

SEQ ID NO: 1141 - protein, 125 aa, synthetic construct
EVQLLESGGGLVQPGGSLRLSCAASGVTFSSYAMSWVRQAPGKGLEWVSGISGGGDITYYADSVKGRFTISRDNSKNTLYLQMNSLRAEDTAVYYCTRAQRYESRGRAYYYMDVWGQGTLVTVSS

SEQ ID NO: 1142 - protein, 122 aa, synthetic construct
EVQLLESGGGLVQPGGSLRLSCAASGFTFSKFAMTWVRQAPGKGLEWVSTISGSVGSTYYADSVKGRFTISRDNSKNTLYLQMNSLRAEDTAVYYCARSRRSYSSGWSIDYWGQGTLVTVSS

SEQ ID NO: 1143 - protein, 120 aa, synthetic construct
EVQLLESGGGLVQPGGSLRLSCAASGFTFTSHAMSWVRQAPGKGLEWVSAITGSGTSTYYADSVKGRFTISRDNSKNTLYLQMNSLRAEDTAVYYCARDILWNYRVADYWGQGTLVTVSS

SEQ ID NO: 1144 - protein, 118 aa, synthetic construct
EVQLLESGGGLVQPGGSLRLSCAASGFTFRRYAMSWVRQAPGKGLEWVSAITGSGGGTYYADSVKGRFTISRDNSKNTLYLQMNSLRAEDTAVYYCARHVSWGWLDPWGQGTLVTVSS

SEQ ID NO: 1145 - protein, 118 aa, synthetic construct
EVQLLESGGGLVQPGGSLRLSCAASGFTFSSSAMGWVRQAPGKGLEWVSLISGSGGSTNYADSVKGRFTISRDNSKNTLYLQMNSLRAEDTAVYYCARVVGATTFDYWGQGTLVTVSS

SEQ ID NO: 1146 - protein, 118 aa, synthetic construct; identical to SEQ ID NO: 1103

SEQ ID NO: 1147 - protein, 115 aa, synthetic construct
EVQLLESGGGLVQPGGSLRLSCAASGITFSSYAMSWVRQAPGKGLEWVSGITGSGGNTYYADSVKGRFTISRDNSKNTLYLQMNSLRAEDTAVYYCAGGSWFDPWGQGTLVTVSS

SEQ ID NO: 1148 - protein, 122 aa, synthetic construct; identical to SEQ ID NO: 1099

SEQ ID NO: 1149 - protein, 121 aa, synthetic construct
EVQLLESGGGLVQPGGSLRLSCAASGFTFSTSAMGWVRQAPGKGLEWVSTISGSGGSTYYADSVKGRFTISRDNSKNTLYLQMNSLRAEDTAVYYCAKDRVFYSSGAFDSWGQGTLVTVSS

SEQ ID NO: 1150 - protein, 125 aa, synthetic construct; identical to SEQ ID NO: 1094

SEQ ID NO: 1151 - protein, 122 aa, synthetic construct
EVQMLESGGGLVQPGGSLRLSCAASGFTFYNYAMSWVRQAPGKGLEWVSDISGSGGSTSYADSVKGRFTISRDNSKNTLYLQMNSLRAEDTAVYYCAKGVVPAAIGGAFDPWGQGTLVTVSS

SEQ ID NO: 1152 - protein, 117 aa, synthetic construct
EVQLLESGGGLVQPGGSLRLSCAASGFTFRSHAMSWVRQAPGKGLELVSALSGSGGRTYYADSVKGRFTISRDNSKNTLYLQMNSLRAEDTAVYYCASSGAGVSDYWGQGTLVTVSS

SEQ ID NO: 1153 - protein, 126 aa, synthetic construct
EVQLLESGGGLVQPGGSLRLSCAASGFAFSSYAMNWVRQAPGKGLEWVSGISGGGGSTYYADSVKGRFTISRDNSKNTLYLQMNSLRAEDTAVYYCARAGLQRINSYYYYYGMDVWGQGTLVTVSS

SEQ ID NO: 1154 - protein, 120 aa, synthetic construct
EVQLLESGGGLVQPGGSLRLSCAASGFTFSGYTMNWVRQAPGKGLEWVSSISGSGGKTYYADSVKGRFTISRDNSKNTLYLQMNSLRAEDTAVYYCARHLTSGWYIFDYWGQGTLVTVSS

SEQ ID NO: 1155 - protein, 117 aa, synthetic construct
EVQLLESGGGLVQPGGSLRLSCAASGFAFRSYAMSWVRQAPGKGLEWVSAITGSGTSTYYADSVKGRFTISRDNSKNTLYLQMNSLRAEDTAVYYCASSGAGVSDYWGQGTLVTVSS

SEQ ID NO: 1156 - protein, 116 aa, synthetic construct
EVQLLESGGGLVQPGGSLRLSCAASGFTFSNFAMSWVRQAPGKGLEWVSLISGSGVSTYYADSVKGRFTISRDNSKNTLYLQMNSLRAEDTAVYYCARGWGAAEEWGQGTLVTVSS

SEQ ID NO: 1157 - protein, 116 aa, synthetic construct
EVQLLESGGGLVQPGGSLRLSCAASGFPLSSYAMSWVRQAPGKGLEWVSSITSEGGSTYYADSVKGRFTISRDNSKNTLYLQMNSLRAEDTAVYYCAKPDVLFDYWGQGTLVTVSS

SEQ ID NO: 1158 - protein, 122 aa, synthetic construct
EVQLLESGGGLVQPGGSLRLSCAASGFSFSRYAMNWVRQAPGKGLEWVSAISGSGGTTFYADSVKGRFTISRDNSKNTLYLQMNSLRAEDTAVYYCAKDGVFRLGSYYFDSWGQGTLVTVSS

SEQ ID NO: 1159 - protein, 116 aa, synthetic construct
EVQLLESGGGLVQPGGSLRLSCAASGFTFSDYDMSWVRQAPGKGLEWVSSLSGSGGATYYADSVKGRFTISRDNSKNTLYLQMNSLRAEDTAVYYCARGYYGMDVWGQGTLVTVSS

SEQ ID NO: 1160 - protein, 118 aa, synthetic construct; identical to SEQ ID NO: 1097

SEQ ID NO: 1161 - protein, 130 aa, synthetic construct
EVQLLESGGGLVQPGGSLRLSCAASGFPFSSHAMSWVRQAPGKGLEWVSSISESGGSTYYADSVKGRFTISRDNSKNTLYLQMNSLRAEDTAVYYCARDKGRAYCSGGICYSGWDWFDPWGQGTLVTVSS

SEQ ID NO: 1162 - protein, 120 aa, synthetic construct
EVQLLESGGGLVQPGGSLRLSCAASGFTFRSHAMSWVRQAPGKGLEWVSALSGSGGRTYYADSVKGRFTISRDNSKNTLYLQMNSLRAEDTAVYYCARDILWNYRVADYWGQGTLVTVSS

SEQ ID NO: 1163 - protein, 120 aa, synthetic construct; identical to SEQ ID NO: 1098

SEQ ID NO: 1164 - protein, 118 aa, synthetic construct
EVQLLESGGGLVQPGGSLRLSCAASGFPLSSYAMSWVRQAPGKGLEWVSLISGSGVSTYYADSVKGRFTISGDNSKNTLYLQMNSLRAEDTAVYYCAKAMKLWPFDYWGQGTLVTVSS

SEQ ID NO: 1165 - protein, 115 aa, synthetic construct
EVQLLESGGGLVQPGGSLRLSCAASGFTFSNFPMSWVRQAPGKGLEWVSGISGSGETTYYADSVKGRFTISRDNSKNTLYLQMNSLRAEDTAVYYCARRGAMDVWGQGTLVTVSS

SEQ ID NO: 1166 - protein, 118 aa, synthetic construct
EVQLLESGGGLVQPGGSLRLSCAASGFTFRSHAMSWVRQAPGKGLEWVSALSGSGGNTYYADSVKGRFTISRDNSKNTLYLQMNSLRAEDTAVYYCAKAMKLWPFDYWGQGTLVTVSS

SEQ ID NO: 1167 - protein, 117 aa, synthetic construct
EVQLLESGGGLVQPGGSLRLSCAASGLTFNNYAMSWVRQAPGKGLEWVSGISGSSGNTYYVDSVKGRFTISRDNSKNTLYLQMNSLRAEDTAVYYCASSGAGVSDYWGQGTLVTVSS

SEQ ID NO: 1168 - protein, 125 aa, synthetic construct
EVQLLESGGGLVQPGGSLRLSCAASGFTFNNYAMSWVRQAPGKGLEWVSAISGSGARTYYADSVKGRFTISRDNSKNTLYLQMNSLRAEDTAVYYCAKDRVPGTVTGRPDAFDIWGQGTLVTVSS

SEQ ID NO: 1169 - protein, 117 aa, synthetic construct
EVQLLESGGGLVQPGGSLRLSCAASGFTLSDYAMSWVRQAPGKGLEWVSTISGSAGSTYYADSVKGRFTISRDNSKNTLYLQMNSLRAEDTAVYYCTPSGAGVSDYWGQGTLVTVSS

SEQ ID NO: 1170 - protein, 119 aa, synthetic construct
EVQLLESGGGSVQPGGSLRLSCAASGFTFSSYALNWVRQAPGKGLEWVSGISGSGGRTYYADSVKGRFTISRDNSKNTLYLQMNSLRAEDTAVYYCARMPNYGYYFDFWGQGTLVTVSS

SEQ ID NO: 1171 - protein, 115 aa, synthetic construct
EVQLLESGGGLVQPGGSLRLSCAASGFTFRSLAMTWVRQAPGKGLEWVSVISGSGGRTDYADSVKGRFTISRDNSKNTLYLQMNSLRAEDTAVYYCARSSRLDYWGQGTLVTVSS

SEQ ID NO: 1172 - protein, 126 aa, synthetic construct
EVQLLESGGGLVQPGGSLRLSCAASGFSLSSYAMSWVRQAPGKGLEWVSGISGSGGRTNYADSVKGRFTISRDNSKNTLYLQMNSLRAEDTAVYYCARDECTSSSCYAGSSAVDYWGQGTLVTVPS

SEQ ID NO: 1173 - protein, 118 aa, synthetic construct
EVQLLESGGGLVQPGGSLRLSCAASGFAFRSYAMSWVRQAPGKGLEWVSGISGSSGNTYYVDSVKGRFTISRDNSKNTLYLQMNSLRAEDTAVYYCARGPNHGMFDAWGQGTLVTVSS

SEQ ID NO: 1174 - protein, 125 aa, synthetic construct; identical to SEQ ID NO: 1168

SEQ ID NO: 1175 - protein, 118 aa, synthetic construct
EVQLLESGGGLVQPGGSLRLSCAASGFTFSSYALAWVRQAPGKGLEWVSAISGSAGRTYYADSVKGRFTISRDNSKNTLYLQMNSLRAEDTAVYYCAIGLGYNWFDPWGQGTLVTVSS

SEQ ID NO: 1176 - protein, 120 aa, synthetic construct
EVQLLESGGGLVQPGGSLRLSCAASGFTFRNYAMNWVRQAPGKGLEWVAAISGSGGRTYYADSVKGRFTISRDNSKNTLYLQMNSLRAEDTAVYYCAREQHLVEGDFDYWGQGTLVTVSS

SEQ ID NO: 1177 - protein, 130 aa, synthetic construct
EVQLLESGGGLVQPGGSLRLSCAASGFTFTSHAMSWVRQAPGKGLEWVSGISGSGANTYYADSVKGRFTISRDNSKNTLYLQMNSLRAEDTAVYYCARDGIVVVPAANHSYYYYYGMDVWGQGTLITVSS

SEQ ID NO: 1178 - protein, 118 aa, synthetic construct; identical to SEQ ID NO: 1097

SEQ ID NO: 1179 - protein, 124 aa, synthetic construct; identical to SEQ ID NO: 1096

SEQ ID NO: 1180 - protein, 117 aa, synthetic construct
EVQLLESGGGLVQPGGSLRLSCAASGFPFGSYAMNWVRQAPGKGLEWVSAIGGSGGSTYYADSVKGRFTISRDNSKNTLYLQMNSLRAEDTAVYYCASSGAGVSDYWGQGTLVTVSS

SEQ ID NO: 1181 - protein, 125 aa, synthetic construct; identical to SEQ ID NO: 1094

SEQ ID NO: 1182 - protein, 120 aa, synthetic construct; identical to SEQ ID NO: 1098

SEQ ID NO: 1183 - protein, 119 aa, synthetic construct
EVQLLESGGGLVQPGGSLRLSCAASGFTFGRFAMSWVRQAPGKGLEWVSAVSGSGGSTHYADSVKGRFTISRDNSKNTLYLQMNSLRAEDTAVYYCARVGGRRNKFDYWGQGTLVTVSS

SEQ ID NO: 1184 - protein, 120 aa, synthetic construct; identical to SEQ ID NO: 1090

SEQ ID NO: 1185 - protein, 124 aa, synthetic construct; identical to SEQ ID NO: 1096

SEQ ID NO: 1186 - protein, 125 aa, synthetic construct; identical to SEQ ID NO: 1094

SEQ ID NO: 1187 - protein, 119 aa, synthetic construct
EVQLLESGGVLVQPGGSLRLSCAASGFTFGNYAMTWVRQAPGKGLEWVSAITGSGGRTNYADSVKGRFTISRDNSKNTLYLQMNSLRAEDTAVYYCARGSRIAASGDYWGQGTLVTVSS

SEQ ID NO: 1188 - protein, 124 aa, synthetic construct
EVQLVESGGGLVQPGGSLRLSCAASGRTFSSIYAMGWFRQAPGKEREFIAVIYWRDGSTLYADSVKGRFTISADNSKNTAYLQMNSLKPEDTAVYYCAAEPYGSGSSLISEYDWGQGTLVTVSS

SEQ ID NO: 1189 - protein, 123 aa, synthetic construct
EVQLVESGGGLVQPGGSLRLSCAASGGRTFSRYDMGWFRQAPGKEREFVAAISMSGDDAAYADSVKGRFTISADNSKNTAYLQMNSLKPEDTAVYYCASDHYDTDTKSDVYNWGQGTLVTVSS

SEQ ID NO: 1190 - protein, 116 aa, synthetic construct
EVQLVESGGGLVQPGGSLRLSCAASGRIFSTYFMGWFRQAPGKEREWVSSIYSDGSTTDYADSVKGRFTISADNSKNTAYLQMNSLKPEDTAVYYCAAWLNGGNRWGQGTLVTVSS

SEQ ID NO: 1191 - protein, 116 aa, synthetic construct
EVQLVESGGGLVQPGGSLRLSCAASGFTLDYYAMGWFRQAPGKEREFVAYVFGGGEITDYADSVKGRFTISADNSKNTAYLQMNSLKPEDTAVYYCANGNGVAETWGQGTLVTVSS

SEQ ID NO: 1192 - protein, 122 aa, synthetic construct
EVQLVESGGGLVQPGGSLRLSCAASGLLFSSYDMGWFRQAPGKEREFVAAIDASGGFTEYADSVKGRFTISADNSKNTAYLQMNSLKPEDTAVYYCASDHYDTDTKSDVYNWGQGTLVTVSS

SEQ ID NO: 1193 - protein, 123 aa, synthetic construct
EVQLVESGGGLVQPGGSLRLSCAASGSIDNIHAMGWFRQAPGKEREFIAVIYWRDGSSLYADSVKGRFTISADNSKNTAYLQMNSLKPEDTAVYYCAAEPYGSGSSLISEYDWGQGTLVTVSS

SEQ ID NO: 1194 - protein, 116 aa, synthetic construct
EVQLVESGGGLVQPGGSLRLSCAASGHTFSSYYMGWFRQAPGKEREFVAAIYSGGITTHYADSVKGRFTISADNSKNTAYLQMNSLKPEDTAVYYCAAWLNGGNRWGQGTLVTVSS

SEQ ID NO: 1195 - protein, 122 aa, synthetic construct
EVQLVESGGGLVQPGGSLRLSCAASGRTFSRSDMGWFRQAPGKEREFVAVISWSGAYTEYADSVKGRFTISADNSKNTAYLQMNSLKPEDTAVYYCASDHYDTDTKSDVYNWGQGTLVTVSS

SEQ ID NO: 1196 - protein, 123 aa, synthetic construct
EVQLVESGGGLVQPGGSLRLSCAASGSGLSINAMGWFRQAPGKEREFVAVIYSSDGSTLYADSVKGRFTISADNSKNTAYLQMNSLKPEDTAVYYCAAEPYGSGSSLISEYDWGQGTLVTVSS

SEQ ID NO: 1197 - protein, 116 aa, synthetic construct
EVQLVESGGGLVQPGGSLRLSCAASGRIFSTYFMGWFRQAPGKEREFVAAIYWSNGKTQYADSVKGRFTISADNSKNTAYLQMNSLKPEDTAVYYCAAWLNGGNRWGQGTLVTVSS

SEQ ID NO: 1198 - protein, 122 aa, synthetic construct
EVQLVESGGGLVQPGGSLRLSCAASGRTWNDLDMGWFRQAPGKEREFVAAISMSGEDAAYADSVKGRFTISADNSKNTAYLQMNSLKPEDTAVYYCASDHYDTDTKSDVYNWGQGTLVTVSS

SEQ ID NO: 1199 - protein, 123 aa, synthetic construct
EVQLVESGGGLVQPGGSLRLSCAASGRSFSTYTMGWFRQAPGKEREFVAVIYTSDGANLYADSVKGRFTISADNSKNTAYLQMNSLKPEDTAVYYCAAETYGSGSSLMSEYDWGQGTLVTVSS

SEQ ID NO: 1200 - protein, 122 aa, synthetic construct
EVQLVESGGGLVQPGGSLRLSCAASGFTFGNYDMGWFRQAPGKEREFVAAIDASGGFTEYADSVKGRFTISADNSKNTAYLQMNSLKPEDTAVYYCASDHYDTDTKSDVYNWGQGTLVTVSS

SEQ ID NO: 1201 - protein, 122 aa, synthetic construct
EVQLVESGGGLVQPGGSLRLSCAASGFTFSTYDMGWFRQAPGKEREFVAAVSQSGLLTFYADSVKGRFTISADNSKNTAYLQMNSLKPEDTAVYYCASDHYDTDTKSDVYNWGQGTLVTVSS

SEQ ID NO: 1202 - protein, 118 aa, synthetic construct
EVQLVESGGGLVQPGGSLRLSCAASGFTFDDYDMGWFRQAPGKERELVASITSGGSTNYADSVKGRFTISADNSKNTAYLQMNSLKPEDTAVYYCAIPHGIDLYTFDWGQGTLVTVSS

SEQ ID NO: 1203 - protein, 115 aa, synthetic construct
EVQLVESGGGLVQPGGSLRLSCAASGRIFSTYFMGWFRQAPGKEREWISTVYSNGHTYYADSVKGRFTISADNSKNTAYLQMNSLKPEDTAVYYCAAWLNGGNRWGQGTLVTVSS

SEQ ID NO: 1204 - protein, 123 aa, synthetic construct
EVQLVESGGGLVQPGGSLRLSCAASGRTSNIYAMGWFRQAPGKEREFVAVIYSSDGSTLYADSVKGRFTISADNSKNTAYLQMNSLKPEDTAVYYCAAEPYGSGSSLMSEYDWGQGTLVTVSS

SEQ ID NO: 1205 - protein, 123 aa, synthetic construct
EVQLVESGGGLVQPGGSLRLSCAASGSISSVNAMGWFRQAPGKEREFIAVIYWRDGSSLYADSVKGRFTISADNSKNTAYLQMNSLKPEDTAVYYCAAEPYGSGSSLISEYDWGQGTLVTVSS

SEQ ID NO: 1206 - protein, 120 aa, synthetic construct
EVQLVESGGGLVQPGGSLRLSCAASGTITSAVFMGWFRQAPGKEREWVATISSHGLPVYADSVKGRFTISADNSKNTAYLQMNSLKPEDTAVYYCAIDEGMDYDGNFYDWGQGTLVTVSS

SEQ ID NO: 1207 - protein, 126 aa, synthetic construct
EVQLVESGGGLVQPGGSLRLSCAASGVITLDSNAMGWFRQAPGKEREFVAAITWDGGYTRYADSVKGRFTISADNSKNTAYLQMNSLKPEDTAVYYCAAEATFPTWNRGSEADYDWGQGTLVTVSS

SEQ ID NO: 1208 - protein, 118 aa, synthetic construct
EVQLVESGGGLVQPGGSLRLSCAASGRIFSTYFMGWFRQAPGKEREFVAASYTGGSGGSTVYADSVKGRFTISADNSKNTAYLQMNSLKPEDTAVYYCAAWLNGGNRWGQGTLVTVSS

SEQ ID NO: 1209 - protein, 116 aa, synthetic construct
EVQLVESGGGLVQPGGSLRLSCAASGVTLDDYAMGWFRQAPGKERELVAAITNGGITTHYADSVKGRFTISADNSKNTAYLQMNSLKPEDTAVYYCAADVGPTVKWGQGTLVTVSS

SEQ ID NO: 1210 - protein, 123 aa, synthetic construct
EVQLVESGGGLVQPGGSLRLSCAASGSIDRINAMGWFRQAPGKEREFVAVIYSSDGSTLYADSVKGRFTISADNSKNTAYLQMNSLKPEDTAVYYCAAEPYGSGSSLISEYDWGQGTLVTVSS

SEQ ID NO: 1211 - protein, 118 aa, synthetic construct
EVQLVESGGGLVQPGGSLRLSCAASGGAFSVYAMGWFRQAPGKEREFLASISGSGGSTYYADSVKGRFTISADNSKNTAYLQMNSLKPEDTAVYYCARDGGTYGMDVWGQGTLVTVSS

SEQ ID NO: 1212 - protein, 119 aa, synthetic construct
EVQLVESGGGLVQPGGSLRLSCAASGFTFSRYEMGWFRQAPGKEREFVAAVTEDGSINYADSVKGRFTISADNSKNTAYLQMNSLKPEDTAVYYCAAVYVSTWGNGYDWGQGTLVTVSS

SEQ ID NO: 1213 - protein, 123 aa, synthetic construct
EVQLVESGGGLVQPGGSLRLSCAASGLTFSRYEMGWFRQAPGKEREFVAAVTEDGSINYADSVKGRFTISADNSKNTAYLQMNSLKPEDTAVYYCAAEIGYYSGGTYFSSEAWGQGTLVTVSS

SEQ ID NO: 1214 - protein, 123 aa, synthetic construct
EVQLVESGGGLVQPGGSLRLSCAASGSISSIHAMGWFRQAPGKEREFIAVIYWRDGSSLYADSVKGRFTISADNSKNTAYLQMNSLKPEDTAVYYCAAEPYGSGSSLMSEYDWGQGTLVTVSS

SEQ ID NO: 1215 - protein, 123 aa, synthetic construct
EVQLVESGGGLVQPGGSLRLSCAASGVTVDYSGMGWFRQAPGKEREFVSAISSYSGNTYYADSVKGRFTISADNSKNTAYLQMNSLKPEDTAVYYCAAAYGGGLYRDPRSYDWGQGTLVTVSS

SEQ ID NO: 1216 - protein, 124 aa, synthetic construct
EVQLVESGGGLVQPGGSLRLSCAASGRTFSSYAMGWFRQAPGKEREFVAVIYSSDGSTLYADSVKGRFTISADNSKNTAYLQMNSLKPEDTAVYYCAAEHTLGRPSRSQINYLWGQGTLVTVSS

SEQ ID NO: 1217 - protein, 123 aa, synthetic construct
EVQLVESGGGLVQPGGSLRLSCAASGNIFRINAMGWFRQAPGKEREFVAVIYSSDGSTLYADSVKGRFTISADNSKNTAYLQMNSLKPEDTAVYYCAAEPYGSGSSLISEYDWGQGTLVTVSS

SEQ ID NO: 1218 - protein, 122 aa, synthetic construct
EVQLVESGGGLVQPGGSLRLSCAASGFTFDDSDMGWFRQAPGKEREFVAVVNWSGSSESYADSVKGRFTISADNSKNTAYLQMNSLKPEDTAVYYCASDHYDTDTKSDVYNWGQGTLVTVSS

SEQ ID NO: 1219 - protein, 122 aa, synthetic construct
EVQLVESGGGLVQPGGSLRLSCAASGFGFGSYDMGWFRQAPGKEREFVAAIYSDGGSAYYADSVKGRFTISADNSKNTAYLQMNSLKPEDTAVYYCASDHYDTDTKSDVYNWGQGTLVTVSS

SEQ ID NO: 1220 - protein, 118 aa, synthetic construct
EVQLVESGGGLVQPGGSLRLSCAASGNIFINNAMGWFRQAPGKEREFVASIEWDGGGAYYADSVKGRFTISADNSKNTAYLQMNSLKPEDTAVYYCARDGGTYGMDVWGQGTLVTVSS

SEQ ID NO: 1221 - protein, 121 aa, synthetic construct
EVQLVESGGGLVQPGGSLRLSCAASGRTISNAAMGWFRQAPGKEREFVAAISFRGDSAIYADSVKGRFTISADNSKNTAYLQMNSLKPEDTAVYYCARDAAGDYYYNLDVWGQGTLVTVSS

SEQ ID NO: 1222 - protein, 115 aa, synthetic construct
EVQLVESGGGLVQPGGSLRLSCAASGLTFSSYWMGWFRQAPGKERELVASITDGGSTNYADSVKGRFTISADNSKNTAYLQMNSLKPEDTAVYYCAVQVNGIWAWGQGTLVTVSS

SEQ ID NO: 1223 - protein, 118 aa, synthetic construct
EVQLVESGGGLVQPGGSLRLSCAASGFSLDDYAMGWFRQAPGKEREFVASVNWSGKDTYYADSVKGRFTISADNSKNTAYLQMNSLKPEDTAVYYCARDGGTYGMDVWGQGTLVTVSS

SEQ ID NO: 1224 - protein, 116 aa, synthetic construct
EVQLVESGGGLVQPGGSLRLSCAASGRTFSSYYMGWFRQAPGKEREEVATFYTGDGRTYYADSVKGRFTISADNSKNTAYLQMNSLKPEDTAVYYCAAWLNGGNRWGQGTLVTVSS

SEQ ID NO: 1225 - protein, 118 aa, synthetic construct
EVQLVESGGGLVQPGGSLRLSCAASGVTFSSYDMGWFRQAPGKEREFVAAINWSGGSRSYADSVKGRFTISADNSKNTAYLQMNSLKPEDTAVYYCAIPRFRPYEYDWGQGTLVTVSS

SEQ ID NO: 1226 - protein, 123 aa, synthetic construct
EVQLVESGGGLVQPGGSLRLSCAASGGTLDDYVMGWFRQAPGKEREFVASIGRSGNSAVNTDYADSVKGRFTISADNSKNTAYLQMNSLKPEDTAVYYCAREPYSGTYYPRYWGQGTLVTVSS

SEQ ID NO: 1227 - protein, 122 aa, synthetic construct
EVQLVESGGGLVQPGGSLRLSCAASGFTFDDYDMGWFRQAPGKERELVAAISATGDDTYYADSVKGRFTISADNSKNTAYLQMNSLKPEDTAVYYCASDHYDTDTKSDVYNWGQGTLVTVSS

SEQ ID NO: 1228 - protein, 119 aa, synthetic construct
EVQLVESGGGLVQPGGSLRLSCAASGSTFSKHHAMGWFRQAPGKERELVASISSDNYTVYADSVKGRFTISADNSKNTAYLQMNSLKPEDTAVYYCAREAANYREPPLWGQGTLVTVSS

SEQ ID NO: 1229 - protein, 123 aa, synthetic construct
EVQLVESGGGLVQPGGSLRLSCAASGSMSSINAMGWFRQAPGKEREFVAVIYSSDGSTLYADSVKGRFTISADNSKNTAYLQMNSLKPEDTAVYYCAAEPYGSGSSLISEYDWGQGTLVTVSS

SEQ ID NO: 1230 - protein, 122 aa, synthetic construct
EVQLVESGGGLVQPGGSLRLSCAASGFSLDDYDMGWFRQAPGKEREFVAVISWSGAYTEYADSVKGRFTISADNSKNTAYLQMNSLKPEDTAVYYCASDHYDTDTKSDVYNWGQGTLVTVSS

SEQ ID NO: 1231 - protein, 120 aa, synthetic construct
EVQLVESGGGLVQPGGSLRLSCAASGDYYAMGWFRQAPGKEREFVAVIYSSDGSTLYADSVKGRFTISADNSKNTAYLQMNSLKPEDTAVYYCAAETYGSGSSLMSEYDWGQGTLVTVSS

SEQ ID NO: 1232 - protein, 122 aa, synthetic construct
EVQLVESGGGLVQPGGSLRLSCAASGLNLSRLDMGWFRQAPGKEREFVAASSWTGANTYYADSVKGRFTISADNSKNTAYLQMNSLKPEDTAVYYCASDHYDTDIKSDVYNWGQGTLVTVSS

SEQ ID NO: 1233 - protein, 118 aa, synthetic construct
EVQLVESGGGLVQPGGSLRLSCAASGFTFSRYEMGWFRQAPGKEREWVASLYLNGDYPYYADSVKGRFTISADNSKNTAYLQMNSLKPEDTAVYYCAIPHGIAGRITWGQGTLVTVSS

SEQ ID NO: 1234 - protein, 116 aa, synthetic construct
EVQLVESGGGLVQPGGSLRLSCAASGRTLVNYDMGWFRQAPGKEREFVAAISMSGEDTIYADSVKGRFTISADNSKNTAYLQMNSLKPEDTAVYYCTTGGGTRDYWGQGTLVTVSS

SEQ ID NO: 1235 - protein, 114 aa, synthetic construct
EVQLVESGGGLVQPGGSLRLSCAASGFTFSRYEMGWFRQAPGKEREFVAAVTEGGTTSYADSVKGRFTISADNSKNTAYLQMNSLKPEDTAVYYCAAESLGRWWGQGTLVTVSS

SEQ ID NO: 1236 - protein, 116 aa, synthetic construct
EVQLVESGGGLVQPGGSLRLSCAASGRTFSRYYMGWFRQAPGKEREFVAAIYWSNGKTQYADSVKGRFTISADNSKNTAYLQMNSLKPEDTAVYYCAAWLNGGNRWGQGTLVTVSS

SEQ ID NO: 1237 - protein, 122 aa, synthetic construct
EVQLVESGGGLVQPGGSLRLSCAASGFTFDDSDMGWFRQAPGKEREFVAAISMSGEDAAYADSVKGRFTISADNSKNTAYLQMNSLKPEDTAVYYCASDHYDTDTKSDVYNWGQGTLVTVSS

SEQ ID NO: 1238 - protein, 116 aa, synthetic construct
EVQLVESGGGLVQPGGSLRLSCAASGYFASWYYMGWFRQAPGKEREEVATFYTGDGRTYYADSVKGRFTISADNSKNTAYLQMNSLKPEDTAVYYCAAWLNGGNRWGQGTLVTVSS

SEQ ID NO: 1239 - protein, 115 aa, synthetic construct
EVQLVESGGGLVQPGGSLRLSCAASGRIFSTYFMGWFRQAPGKEREWVSTIYSNGTPAYADSVKGRFTISADNSKNTAYLQMNSLKPEDTAVYYCAAWLNGGNRWGQGTLVTVSS

SEQ ID NO: 1240 - protein, 123 aa, synthetic construct
EVQLVESGGGLVQPGGSLRLSCAASGGRTFSDYDMGWFRQAPGKEREFVAAIDASGGFTEYADSVKGRFTISADNSKNTAYLQMNSLKPEDTAVYYCASDHYDTDTKSDVYNWGQGTLVTVSS

SEQ ID NO: 1241 - protein, 122 aa, synthetic construct
EVQLVESGGGLVQPGGSLRLSCAASGFTFDDYDMGWFRQAPGKEREFVAAIAWTGTNSYYADSVKGRFTISADNSKNTAYLQMNSLKPEDTAVYYCASDHYDTDTKSDVYNWGQGTLVTVSS

SEQ ID NO: 1242 - protein, 124 aa, synthetic construct
EVQLVESGGGLVQPGGSLRLSCAASGLPFSTLHMGWFRQAPGKEREFVAAISRSGNLKAYADSVKGRFTISADNSKNTAYLQMNSLKPEDTAVYYCAADDYLGGDNWYLGPYDWGQGTLVTVSS

SEQ ID NO: 1243 - protein, 122 aa, synthetic construct
EVQLVESGGGLVQPGGSLRLSCAASGFTLDHYDMGWFRQAPGKEREFVAVINWSGAYTEYADSVKGRFTISADNSKNTAYLQMNSLKPEDTAVYYCASDHYDTDTKSDVYNWGQGTLVTVSS

SEQ ID NO: 1244 - protein, 119 aa, synthetic construct
EVQLVESGGGLVQPGGSLRLSCAASGFTFSRYEMGWFRQAPGKEREFVATITEGGARNYADSVKGRFTISADNSKNTAYLQMNSLKPEDTAVYYCAAVYVSTWGNGYDWGQGTLVTVSS

SEQ ID NO: 1245 - protein, 116 aa, synthetic construct
EVQLVESGGGLVQPGGSLRLSCAASGRILNTYFMGWFRQAPGKERELVAAIYWSNGKTQYADSGKGRFTINADNSKNTAYLQMNSLKPEDTAVYYCAAWLNGGNRWGQGTLVTVSS

SEQ ID NO: 1246 - protein, 116 aa, synthetic construct
EVQLVESGGGLVQPGGSLRLSCAASGFTLDYYAMGWFRQAPGKERELVASISNGGLSTYYADSVKGRFTISADNSKNTAYLQMNSLKPEDTAVYYCAADVGPTVKWGQGTLVTVSS

SEQ ID NO: 1247 - protein, 121 aa, synthetic construct
EVQLVESGGGLVQPGGSLRLSCAASGLNLSRLDMGWFRQAPGKEREFVAAVDNDDNTEYADSVKGRFTISADNSKNTAYLQMNSLKPEDTAVYYCASDHYDTDTKSDVYNWGQGTLVTVSS

SEQ ID NO: 1248 - protein, 118 aa, synthetic construct
EVQLVESGGGLVQPGGSLRLSCAASGFTFSRYEMGWFRQAPGKEREFVAAVTEDGSIYADSVKGRFTISADNSKNTAYLQMNSLKPEDTAVYYCAAVYVSTWGNGYDWGQGTLVTVSS

SEQ ID NO: 1249 - protein, 123 aa, synthetic construct; identical to SEQ ID NO: 1215

SEQ ID NO: 1250 - protein, 116 aa, synthetic construct
EVQLVESGGGLVQPGGSLRLSCAASGFTLSSNWMGWFRQAPGKEREFVAQINWLSESTYYADSVKGRFTISADNSKNTAYLQMNSLKPEDTAVYYCAAGDYTDSMWGQGTLVTVSS

SEQ ID NO: 1251 - protein, 121 aa, synthetic construct
EVQLVESGGGLVQPGGSLRLSCAASGFTFSRYEMGWFRQAPGKEREMVAAIDDGGNTEYADSVKGRFTISADNSKNTAYLQMNSLKPEDTAVYYCASDHYDTDTKSDVYNWGQGTLVTVSS

SEQ ID NO: 1252 - protein, 122 aa, synthetic construct
EVQLVESGGGLVQPGGSLRLSCAASGFTYGNYDMGWFRQAPGKEREFVAVISWSGAYTEYADSVKGRFTISADNSKNTAYLQMNSLKPEDTAVYYCASDHYDTDTKSDVYNWGQGTLVTVSS

SEQ ID NO: 1253 - protein, 121 aa, synthetic construct
EVQLVESGGGLVQPGGSLRLSCAASGGTLDDYVMGWFRQAPGKEREFVAAVSYSGSYYADSVKGRFTISADNSKNTAYLQMNSLKPEDTAVYYCAAAYGGGLYRDPRSYDWGQGSLVTVSS

SEQ ID NO: 1254 - protein, 121 aa, synthetic construct
EVQLVESGGGLVQPGGSLRLSCAASGRTFSGYAMGWFRQAPGKEREWVAAIRWSGGSTYYADSVKGRFTISADNSKNTAYLQMNSLKPEDTAVYYCAHSLRHEGDNWFDPWGQGTLVTVSS

SEQ ID NO: 1255 - protein, 116 aa, synthetic construct
EVQLVESGGGLVQPGGSLRLSCAASGFTLDYYDMGWFRQAPGKEREFVGSITWRGLTEYADSVKGRFTISADNSKNTAYLQMNSLKPEDTAVYYCATPYYYYMDVWGQGTLVTVSS

SEQ ID NO: 1256 - protein, 122 aa, synthetic construct
EVQLVESGGGLVQPGGSLRLSCAASGRTLSNYDMGWFRQAPGKEREFVAAVNWSGRRELYADSVKGRFTISADNSKNTAYLQMNSLKPEDTAVYYCASDHYDTDTKSDVYNWGQGTLVTVSS

SEQ ID NO: 1257 - protein, 114 aa, synthetic construct
EVQLVESGGGLVQPGGSLRLSCAASGNIFGVNPMGWFRQAPGKEREFVASIRGDGRTYADSVKGRFTISADNSKNTAYLQMNSLKPEDTAVYYCATDLRYGFYWGQGTLVTVSS

SEQ ID NO: 1258 - protein, 123 aa, synthetic construct
EVQLVESGGGLVQPGGSLRLSCAASGSIDNIHAMGWFRQAPGKERKFVAVIYSSDGSTLYADSVKGRFTISADNSKNTAYLQMNSLKPEDTAVYYCAAEPYGSGSSLMSEYDWGQGTLVTVSS

SEQ ID NO: 1259 - protein, 122 aa, synthetic construct
EVQLVESGGGLVQPGGSLRLSCAASGFTRDYYTMGWFRQAPGKEREWVALIVGEAITRYADSVKGRFTISADNSKNTAYLQMNSLKPEDTAVYYCAADGVPEYSDYASGPVWGQGTLVTVSS

SEQ ID NO: 1260 - protein, 117 aa, synthetic construct
EVQLVESGGGLVQPGGSLRLSCAASGFTLGNYAMGWFRQAPGKEREFVASITSYGDTYYADSVKGRFTISADNSKNTAYLQMNSLKPEDTAVYYCARDGYTYGVDYWGQGTLVTVSS

SEQ ID NO: 1261 - protein, 116 aa, synthetic construct
EVQLVESGGGLVQPGGSLRLSCAASGRTFSSYYMGWFRQAPGKERELVAVIYTSDGSTYYADSVKGRFTISADNSKNTAYLQMNSLKPEDTAVYYCAAWLNGGNRWGQGTLVTVSS

SEQ ID NO: 1262 - protein, 122 aa, synthetic construct
EVQLVESGGGLVQPGGSLRLSCAASGRTFSNFAMGWFRQAPGKEREEVASITWIGGGTYYADSVKGRFTISADNSKNTAYLQMNSLKPEDTAVYYCARQDDFWSGYYLPILWGQGTLVTVSS

SEQ ID NO: 1263 - protein, 122 aa, synthetic construct
EVQLVESGGGLVQPGGSLRLSCAASGRTFSTSAMGWFRQAPGKEREWVATIYSRSGGGTAYADSVKGRFTISADNSKNTAYLQMNSLKPEDTAVYYCAKEGYDWGDYVMDYWGQGTLVTVSS

SEQ ID NO: 1264 - protein, 124 aa, synthetic construct
EVQLVESGGGLVQPGGSLRLSCAASGFNLDDYAMGWFRQAPGKEREWVAGISNGGISTYYADSVKGRFTISADNSKNTAYLQMNSLKPEDTAVYYCAAEHTLGRPSRSQINYLWGQGTLVTVSS

SEQ ID NO: 1265 - protein, 123 aa, synthetic construct
EVQLVESGGGLVQPGGSLRLSCAASGGTFSVFAMGWFRQAPGKEREFVAVIYSSDGSTLYADSVKGRFTISADNSKNTAYLQMNSLKPEDTAVYYCAAEPYGSGSSLISEYDWGQGTLVTVSS

SEQ ID NO: 1266 - protein, 119 aa, synthetic construct
EVQLVESGGGLVQPGGSLRLSCAASGSIYSLDAMGWFRQAPGKEREFVASISGSGGGTAYADSVKGRFTISADNSKNTAYLQMNSLKPEDTAVYYCARDPYTWSHPVVWGQGTLVTVSS

SEQ ID NO: 1267 - protein, 118 aa, synthetic construct; identical to SEQ ID NO: 1202

SEQ ID NO: 1268 - protein, 123 aa, synthetic construct
EVQLVESGGGLVQPGGSLRLSCAASGGIFGINAMGWFRQAPGKEREFIAVIYWRDGSSLYADSVKGRFTISADNSKNTAYLQMNSLKPEDTAVYYCAAEPYGSGSSLISEYDWGQGTLVTVSS

SEQ ID NO: 1269 - protein, 116 aa, synthetic construct
EVQLVESGGGLVQPGGSLRLSCAASGRIFSTYFMGWFRQAPGKEREGVATIYTGNGYTLYADSVKGRFTISADNSKNTAYLQMNSLKPEDTAVYYCAAWLNGGNRWGQGTLVTVSS

SEQ ID NO: 1270 - protein, 123 aa, synthetic construct
EVQLVESGGGLVQPGGSLRLSCAASGRTSNIYAMGWFRQAPGKEREFIAVIYWRDGSSLYADSVKGRFTISADNSKNTAYLQMNSLKPEDTAVYYCAAEPYGSGSSLISEYDWGQGTLVTVSS

SEQ ID NO: 1271 - protein, 120 aa, synthetic construct
EVQLVESGGGLVQPGGSLRLSCAASGRISNINIMGWFRQAPGKEREFVAGISQSGGSTAYADSVKGRFTISADNSKNTAYLQMNSLKPEDTAVYYCSRDEKLGPYYFDYWGQGTLVTVSS

SEQ ID NO: 1272 - protein, 122 aa, synthetic construct
EVQLVESGGGLVQPGGSLRLSCAASGLNLSRLDMGWFRQAPGKEREFVAAVSGSGDDTYYADSVKGRFTISADNSKNTAYLQMNSLKPEDTAVYYCASDHYDTDTKSDVYNWGQGTLVTVSS

SEQ ID NO: 1273 - protein, 122 aa, synthetic construct
EVQLVESGGGLVQPGGSLRLSCAASGRTLTNYDMGWFRQAPGKEREFVAVINSGGGSTQYADSVKGRFTISADNSKNTAYLQMNSLKPEDTAVYYCASDHYDTDTKSDVYNWGQGTLVTVSS

SEQ ID NO: 1274 - protein, 122 aa, synthetic construct
EVQLVESGGGLVQPGGSLRLSCAASGFTFDDYDMGWFRQAPGKEREFVAAISMSGDDAAYADSVKGRFTISADNSKNTAYLQMNSLKPEDTAVYYCASDHYDTDTKSDVYNWGQGTLVTVSS

SEQ ID NO: 1275 - protein, 122 aa, synthetic construct
EVQLVESGGGLVQPGGSLRLSCAASGFTFDDYDMGWFRQAPGKEREFVAAIDWSGGSTYYADSVKGRFTISADNSKNTAYLQMNSLKPEDTAVYYCASDHYDTDTKSDVYNWGQGTLVTVSS

SEQ ID NO: 1276 - protein, 122 aa, synthetic construct
EVQLVESGGGLVQPGGSLRLSCAASGRIFSTYFMGWFRQAPGKEREFVAAIYWSNGKTQYADSVKGRFTISADNSKNTAYLQMNSLKPEDTAVYYCASDHYDTDTKSDVYNWGQGTLVTVSS

SEQ ID NO: 1277 - protein, 114 aa, synthetic construct
EVQLVESGGGLVQPGGSLRLSCAASGFTFSRYEMGWFRQAPGKEREFVAAVTEDGSIYADSVKGRFTISADNSKNTAYLQMNSLKPEDTAVYYCAAWLNGGNRWGQGTLVTVSS

SEQ ID NO: 1278 - protein, 123 aa, synthetic construct
EVQLVESGGGLVQPGGSLRLSCAASGGTFSSFPMGWFRQAPGKEREFVAAISWSEDNTYYADSVKGRFTISADNSKNTAYLQMNSLKPEDTAVYYCASRLAFCGRDCYLPTDWGQGTLVTVSS

SEQ ID NO: 1279 - protein, 122 aa, synthetic construct
EVQLVESGGGLVQPGGSLRLSCAASGFTFDDSDMGWFRQAPGKEREFVAAIDASGGFTEYADSVKGRFTISADNSKNTAYLQMNSLKPEDTAVYYCASDHYDTDTKSDVYNWGQGTLVTVSS

SEQ ID NO: 1280 - protein, 122 aa, synthetic construct
EVQLVESGGGLVQPGGSLRLSCAASGRIFSTYFMGWFRQAPGKEREWVSSIYSDGSTTDYADSVKGRFTISADNSKNTAYLQMNSLKPEDTAVYYCASDHYDTDTKSDVYNWGQGTLVTVSS

SEQ ID NO: 1281 - protein, 123 aa, synthetic construct
EVQLVESGGGLVQPGGSLRLSCAASGFTFDRSWMGWFRQAPGKEREFVGAINWLSESTYYADSVKGRFTISADNSKNTAYLQMNSLKPEDTAVYYCAAAYGGGLYRDPRSYDWGQGTLVTVSS

SEQ ID NO: 1282 - protein, 123 aa, synthetic construct
EVQLVESGGGLVQPGGSLRLSCAASGRIFSTYFMGWFRQAPGKEREWVSSIYSDGSTTDYADSVKGRFTISADNSKNTAYLQMNSLKPEDTAVYYCAAEPYGSGSSLISEYDWGQGTLVTVSS

SEQ ID NO: 1283 - protein, 123 aa, synthetic construct
EVQLVESGGGLVQPGGSLRLSCAASGGTFSAFPMGWFRQAPGKEREWVAAITSSGDSIYYADSVKGRFTISADNSKNTAYLQMNSLKPEDTAVYYCTSRLAFCGRDCYLPTTWGQGTLVTVSS

SEQ ID NO: 1284 - protein, 123 aa, synthetic construct
EVQLVESGGGLVQPGGSLRLSCAASGGTFGHYAMGWFRQAPGKEREFVAVIYSSDGSTLYADSVKGRFTISADNSKNTAYLQMNSLKPEDTAVYYCAAEPYGSGSSLISEYDWGQGTLVTVSS

SEQ ID NO: 1285 - protein, 127 aa, synthetic construct
EVQLVESGGGLVQPGGSLRLSCAASGITFKRYDMGWFRQAPGKEREVVAVIYTSDGSTYYADSVKGRFTISADNSKNTAYLQMNSLKPEDTAVYYCAADRDRYRDGMGPMTTTDFRWGQGTLVTVSS

SEQ ID NO: 1286 - protein, 120 aa, synthetic construct
EVQLVESGGGLVQPGGSLRLSCAASGFTPDDYAMGWFRQAPGKEREFVADIMPYGSTEYADSVKGRFTISADNSKNTAYLQMNSLKPEDTAVYYCARRDAGIDFYYMDVWGQGTLVTVSS

SEQ ID NO: 1287 - protein, 120 aa, synthetic construct
EVQLVESGGGLVQPGGSLRLSCAASGFTFDDYNMGWFRQAPGKEREWVSSISSTYGLTYYADSVKGRFTISADNSKNTAYLQMNSLKPEDTAVYYCTRLIDDFVTGYDYWGQGTLVTVSS

SEQ ID NO: 1288 - protein, 117 aa, synthetic construct
EVQLVESGGGLVQPGGSLRLSCAASGGTFESDTMGWFRQAPGKEREWISSIYSNGHTYADSVKGRFTISADNSKNTAYLQMNSLKPEDTAVYYCARGGGSTIIFDIWGQGTLVTVSS

SEQ ID NO: 1289 - protein, 122 aa, synthetic construct
EVQLVESGGGLVQPGGSLRLSCAASGLTFSRYEMGWFRQAPGKEREFVAAVTEDGSIYADSVKGRFTISADNSKNTAYLQMNSLKPEDTAVYYCAAEIGYYSGGTYFSSEAWGQGTLVTVSS

SEQ ID NO: 1290 - protein, 124 aa, synthetic construct
EVQLVESGGGLVQPGGSLRLSCAASGRSFSSVYAMGWFRQAPGKEREFIAVIYWRDGSSLYADSVKGRFTISADNSKNTAYLQMNSLKPEDTAVYYCAAEPYGSGSSLISEYDWGQGTLVTVSS

SEQ ID NO: 1291 - protein, 116 aa, synthetic construct
EVQLVESGGGLVQPGGSLRLSCAASGFPFGMYGMGWFRQAPGKEREWVATSSNTGGTTYADSVKGRFTISADNSKNTAYLQMNSLKPEDTAVYYCAGGIDLYTFHWGQGTLVTVSS

SEQ ID NO: 1292 - protein, 122 aa, synthetic construct
EVQLVESGGGLVQPGGSLRLSCAASGITFSSRTMGWFRQAPGKEREFVAAIRSSGGLFYADSVKGRFTISADNSKNTAYLQMNSLKPEDTAVYYCAAQDRRHGDYYTFDYHWGQGTLVTVSS

SEQ ID NO: 1293 - protein, 116 aa, synthetic construct
EVQLVESGGGLVQPGGSLRLSCAASGLTFNDYAMGWFRQAPGKEREFVAGITNGGGRTSYADSVKGRFTISADNSKNTAYLQMNSLKPEDTAVYYCAADVGPTVKWGQGTLVTVSS

SEQ ID NO: 1294 - protein, 116 aa, synthetic construct
EVQLVESGGGLVQPGGSLRLSCAASGFSFDDYAMGWFRQAPGKEREFVAAISGWSGGTYYADSVKGRFTISADNSKNTAYLQMNSLKPEDTAVYYCASDGPDAYNWGQGTLVTVSS

SEQ ID NO: 1295 - protein, 125 aa, synthetic construct
EVQLVESGGGLVQPGGSLRLSCAASGFTFGSNGMGWFRQAPGKEREEVAAIDSDGSTNYADSVKGRFTISADNSKNTAYLQMNSLKPEDTAVYYCAADPYYSGSYYYTDPDRYDWGQGTLVTVSS

SEQ ID NO: 1296 - protein, 123 aa, synthetic construct
EVQLVESGGGLVQPGGSLRLSCAASGSILSINAMGWFRQAPGKEREFVAVIYSSDGSTLYADSVKGRFTISADNSKNTAYLQMNSLKPEDTAVYYCAAEPYGSGSSLMSEYDWGQGTLVTVSS

SEQ ID NO: 1297 - protein, 123 aa, synthetic construct
EVQLVESGGGLVQPGGSLRLSCAASGSSGVINAMGWFRQAPGKEREFIAVIYWRDGSSLYADSVKGRFTISADNSKNTAYLQMNSLKPEDTAVYYCAAEPYGSGSSLISEYDWGQGTLVTVSS

SEQ ID NO: 1298 - protein, 118 aa, synthetic construct
EVQLVESGGGLVQPGGSLRLSCAASGDTSEINDMGWFRQAPGKEREFVAAIYPSGRNAYYADSVKGRFTISADNSKNTAYLQMNSLKPEDTAVYYCAIPHGIAGRITWGQGTLVTVSS

SEQ ID NO: 1299 - protein, 121 aa, synthetic construct
EVQLVESGGGLVQPGGSLRLSCAASGRAFSSYAMGWFRQAPGKEREWVSAISWNGGITYYADSVKGRFTISADNSKNTAYLQMNSLKPEDTAVYYCAHSLRHEGDNWFDPWGQGTLVTVSS

SEQ ID NO: 1300 - protein, 116 aa, synthetic construct
EVQLVESGGGLVQPGGSLRLSCAASGSMSSINAMGWFRQAPGKEREFVAVIYSSDGSTLYADSVKGRFTISADNSKNTAYLQMNSLKPEDTAVYYCAAWLNGGNRWGQGTLVTVSS

SEQ ID NO: 1301 - protein, 118 aa, synthetic construct
EVQLVESGGGLVQPGGSLRLSCAASGRTFSPYIMGWFRQAPGKEREFVAEIGWRDTTLYADSVKGRFTISADNSKNTAYLQMNSLKPEDTAVYYCAARRGGDYLPTDWGQGTLVTVSS

SEQ ID NO: 1302 - protein, 116 aa, synthetic construct
EVQLVESGGGLVQPGGSLRLSCAASGRTFSRYEMGWFRQAPGKEREFVAAVTEDGSTYYADSVKGRFTISADNSKNTAYLQMNSLKPEDTAVYYCAIAHGSSTYNWGQGTLVTVSS

SEQ ID NO: 1303 - protein, 123 aa, synthetic construct
EVQLVESGGGLVQPGGSLRLSCAASGTVFSINDMGWFRQAPGKEREFVAAMFTGTGSTYYADSVKGRFTISADNSKNTAYLQMNSLKPEDTAVYYCAEGYCSSTSCYSAFDIWGQGTLVTVSS

SEQ ID NO: 1304 - protein, 123 aa, synthetic construct
EVQLVESGGGLVQPGGSLRLSCAASGFIGNYHAMGWFRQAPGKEREFIAVIYWRDGSSLYADSVKGRFTISADNSKNTAYLQMNSLKPEDTAVYYCAAEPYGSGSSLISEYDWGQGTLVTVSS

SEQ ID NO: 1305 - protein, 116 aa, synthetic construct
EVQLVESGGGLVQPGGSLRLSCAASGVTVDYSGMGWFRQAPGKEREFVSAISSYSGNTYYADSVKGRFTISADNSKNTAYLQMNSLKPEDTAVYYCAAWLNGGNRWGQGTLVTVSS

SEQ ID NO: 1306 - protein, 124 aa, synthetic construct
EVQLVESGGGLVQPGGSLRLSCAASGSAFGDSWMGWFRQAPGKEREFVATINWSGNINYADSVKGRFTISADNSKNTAYLQMNSLKPEDTAVYYCARDSGWATVTHNSYYFDYWGQGTLVTVSS

SEQ ID NO: 1307 - protein, 123 aa, synthetic construct
EVQLVESGGGLVQPGGSLRLSCAASGRIFSTYFMGWFRQAPGKEREFVAAIYWSNGKTQYADSVKGRFTISADNSKNTAYLQMNSLKPEDTAVYYCAAEPYGSGSSLISEYDWGQGTLVTVSS

SEQ ID NO: 1308 - protein, 123 aa, synthetic construct
EVQLVESGGGLVQPGGSLRLSCAASGRTFSTYAMGWFRQAPGKEREFVAVIYSSDGSTLYADSVKGRFTISADNSKNTAYLQMNSLKPEDTAVYYCAAEPYGSGSSLISEYDWGQGTLVTVSS

SEQ ID NO: 1309 - protein, 125 aa, synthetic construct
EVQLVESGGGLVQPGGSLRLSCAASGLLFSSYDMGWFRQAPGKEREFVAAISWSTGSGDDTYYADSVKGRFTISADNSKNTAYLQMNSLKPEDTAVYYCASDHYDTDTKSDVYNWGQGTLVTVSS

SEQ ID NO: 1310 - protein, 123 aa, synthetic construct
EVQLVESGGGLVQPGGSLRLSCAASGRTFSIYAMGWFRQAPGKEREFVAVIYSSDGSTLYADSVKGRFTISADNSKNTAYLQMNSLKPEDTAVYYCAAEPYGSGSSLMSEYDWGQGTLVTVSS

SEQ ID NO: 1311 - protein, 118 aa, synthetic construct
EVQLVESGGGLVQPGGSLRLSCAASGFTLDAYAMGWFRQAPGKEREFVAEIGWRDTTLYADSVKGRFTISADNSKNTAYLQMNSLKPEDTAVYYCAKRLGGNPLPDYWGQGTLVTVSS

SEQ ID NO: 1312 - protein, 121 aa, synthetic construct
EVQLVESGGGLVQPGGSLRLSCAASGFTFDYYTMGWFRQAPGKEREFVAVIYSSDGSTLYADSVKGRFTISADNSKNTAYLQMNSLKPEDTAVYYCAIDEGMDYDGNFYDWGQGTLVTVSS

SEQ ID NO: 1313 - protein, 116 aa, synthetic construct
EVQLVESGGGLVQPGGSLRLSCAASGNIFRINAMGWFRQAPGKEREFVAVIYSSDGSTLYADSVKGRFTISADNSKNTAYLQMNSLKPEDTAVYYCAAWLNGGNRWGQGTLVTVSS

SEQ ID NO: 1314 - protein, 121 aa, synthetic construct
EVQLVESGGGLVQPGGSLRLSCAASGFTFSRYEMGWFRQAPGKERELVASITNGGSTYYADSVKGRFTISADNSKNTAYLQMNSLKPEDTAVYYCASDHYDTDTKSDVYNWGQGTLVTVSS

SEQ ID NO: 1315 - protein, 117 aa, synthetic construct
EVQLVESGGGLVQPGGSLRLSCAASGLTFGTHVMGWFRQAPGKEREFVASIDWSGRSTYYADSVKGRFTISADNSKNTAYLQMNSLKPEDTAVYYCAADVWGLGYDWGQGTLVTVSS

SEQ ID NO: 1316 - protein, 120 aa, synthetic construct
EVQLVESGGGLVQPGGSLRLSCAASGFTFSRYEMGWFRQAPGKEREFVAAVTEDGSIYADSVKGRFTISADNSKNTAYLQMNSLKPEDTAVYYCASDHYDTDTKSDVYNWGQGTLVTVSS

SEQ ID NO: 1317 - protein, 118 aa, synthetic construct
EVQLVESGGGLVQPGGSLRLSCAASGFTFDDYPMGWFRQAPGKEREFVAAIGLNTYYADSVKGRFTISADNSKNTAYLQMNSLKPEDTAVYYCAADVWYGSTGWDFAWGQGTLVTVSS

SEQ ID NO: 1318 - protein, 122 aa, synthetic construct
EVQLVESGGGLVQPGGSLRLSCAASGFTYGNYDMGWFRQAPGKEREFVAAIYPSGRNAYYADSVKGRFTISADNSKNTAYLQMNSLKPEDTAVYYCASDHYDTDTKSDVYNWGQGTLVTVSS

SEQ ID NO: 1319 - protein, 123 aa, synthetic construct
EVQLVESGGGLVQPGGSLRLSCAASGSIDRINAMGWFRQAPGKEREFIAVIYWRDGSSLYADSVKGRFTISADNSKNTAYLQMNSLKPEDTAVYYCAAEPYGSGSSLISEYDWGQGTLVTVSS

SEQ ID NO: 1320 - protein, 123 aa, synthetic construct
EVQLVESGGGLVQPGGSLRLNCAASGSIENINAMGWFRQAPGKEREFVAVIYSSDGSTLYADSVKGRFTISADNSKNTAYLQMNSLKPEDTAVYYCAAETFGSGSSLMSEYDWGQGTLVTVSS

SEQ ID NO: 1321 - protein, 123 aa, synthetic construct
EVQLVESGGGLVQPGGSLRLSCAASGFTFSRYEMGWFRQAPGKEREFVATITEGGARNYADSVKGRFTISADNSKNTAYLQMNSLKPEDTAVYYCAAEIGYYSGGTYFSSEAWGQGTLVTVSS

SEQ ID NO: 1322 - protein, 123 aa, synthetic construct
EVQLVESGGGLVQPGGSLRLSCAASGRIFSTYFMGWFRQAPGKEREFVAVIYSSDGSTLYADSVKGRFTISADNSKNTAYLQMNSLKPEDTAVYYCAAEPYGSGSSLISEYDWGQGTLVTVSS

SEQ ID NO: 1323 - protein, 122 aa, synthetic construct
EVQLVESGGGLVQPGGSLRLSCAASGFTFSDYDMGWFRQAPGKEREFVAAISMSGEDAAYADSVKGRFTISADNSKNTAYLQMNSLKPEDTAVYYCASDHYDTDTKSDVYNWGQGTLVTVSS

SEQ ID NO: 1324 - protein, 119 aa, synthetic construct
EVQLVESGGGLVQPGGSLRLSCAASGFTFSRYEMGWFRQAPGKEREFVAAIDDGGNTEYADSVKGRFTISADNSKNTAYLQMNSLKPEDTAVYYCAAVYVSTWGNGYDWGQGTLVTVSS

SEQ ID NO: 1325 - protein, 122 aa, synthetic construct
EVQLVESGGGLVQPGGSLRLSCAASGFTFGNYDMGWFRQAPGKEREFVAVIDTNGGLIAYADSVKGRFTISADNSKNTAYLQMNSLKPEDTAVYYCASDHYDTDTKSDVYNWGQGTLVTVSS

SEQ ID NO: 1326 - protein, 118 aa, synthetic construct
EVQLVESGGGLVQPGGSLRLSCAASGFTFDDRAMGWFRQAPGKEREFVAVIYSSDGSTLYADSVKGRFTISADNSKNTAYLQMNSLKPEDTAVYYCAKEEWELPFDYWGQGTLVTVSS

SEQ ID NO: 1327 - protein, 118 aa, synthetic construct
EVQLVESGGGLVQPGGSLRLSCAASGNIFSHNAMGWFRQAPGKEREFVASMRGSGSTVYADSVKGRFTISADNSKNTAYLQMNSLKPEDTAVYYCAKSVYGDYIFDYWGQGTLVTVSS

SEQ ID NO: 1328 - protein, 118 aa, synthetic construct
EVQLVESGGGLVQPGGSLRLSCAASGGTLDDYAMGWFRQAPGKEREFLASVSWGFGSTYYADSVKGRFTISADNSKNTAYLQMNSLKPEDTAVYYCAKDGGSYGMDVWGQGTLVTVSS

SEQ ID NO: 1329 - protein, 119 aa, synthetic construct
EVQLVESGGGLVQPGGSLRLSCAASGITFSSTVMGWFRQAPGKEREFVSAISADGSDKRYADSVKGRFTISADNSKNTAYLQMNSLKPEDTAVYYCAGQYGTALFFDYWGQGTLVTVSS

SEQ ID NO: 1330 - protein, 122 aa, synthetic construct
EVQLVESGGGLVQPGGSLRLSCAASGRTFSSYDMGWFRQAPGKEREFVAAIDASGGFTEYADSVKGRFTISADNSKNTAYLQMNSLKPEDTAVYYCASDHYDTDTKSDVYNWGQGTLVTVSS

SEQ ID NO: 1331 - protein, 124 aa, synthetic construct
EVQLVESGGGLVQPGGSLRLSCAASGGTFSVFAMGWFRQAPGKEREFVATIGSGGTTNYADSVKGRFTISADNSKNTAYLQMNSLKPEDTAVYYCARDSGWATVTHNSYYFDYWGQGTLVTVSS

SEQ ID NO: 1332 - protein, 120 aa, synthetic construct
EVQLVESGGGLVQPGGSLRLSCAASGRIFSTYFMGWFRQAPGKEREWVSSIYSDGSTTDYADSVKGRFTISADNSKNTAYLQMNSLKPEDTAVYYCAAVYVSTWGNGYDWGQGTLVTVSS

SEQ ID NO: 1333 - protein, 116 aa, synthetic construct
EVQLVESGGGLVQPGGSLRLSCAASGSIDNIHAMGWFRQAPGKEREFIAVIYWRDGSSLYADSVKGRFTISADNSKNTAYLQMNSLKPEDTAVYYCAAWLNGGNRWGQGTLVTVSS

SEQ ID NO: 1334 - protein, 121 aa, synthetic construct
EVQLVESGGGLVQPGGSLRLSCAASGFTFSRYEMGWFRQAPGKEREFVATITEGGARNYADSVKGRFTISADNSKNTAYLQMNSLKPEDTAVYYCASDHYDTDTKSDVYNWGQGTLVTVSS

SEQ ID NO: 1335 - protein, 122 aa, synthetic construct
EVQLVESGGGLVQPGGSLRLSCAASGFTFGNYDMGWFRQAPGKERELVAAISMSGDDAAYADSVKGRFTISADNSKNTAYLQMNSLKPEDTAVYYCASDHYDTDTKSDVYNWGQGTLVTVSS

SEQ ID NO: 1336 - protein, 120 aa, synthetic construct
EVQLVESGGGLVQPGGSLRLSCAASGSIFSIDVMGWFRQAPGKEREFVASISGSGEDTYYADSVKGRFTISADNSKNTAYLQMNSLKPEDTAVYYCAANVKTWAGMTRDWGQGTLVTVSS

SEQ ID NO: 1337 - protein, 120 aa, synthetic construct
EVQLVESGGGLVQPGGSLRLSCAASGFPLDDYDMGWFRQAPGKEREFVAAIDASGGTYADSVKGRFTISADNSKNTAYLQMNSLKPEDTAVYYCASDHYDTDTKSDVYNWGQGTLVTVSS

SEQ ID NO: 1338 - protein, 119 aa, synthetic construct
EVQLVESGGGLVQPGGSLRLSCAASGFTFADYAMGWFRQAPGKEREFVAVINRSGASTVYADSVKGRFTISADNSKNTAYLQMNSLKPEDTAVYYCARLPLGEYQFDYWGQGTLVTVSS

SEQ ID NO: 1339 - protein, 116 aa, synthetic construct
EVQLVESGGGLVQPGGSLRLSCAASGFTFSTYDMGWFRQAPGKEREFVAAVSQSGLLTFYADSVKGRFTISADNSKNTAYLQMNSLKPEDTAVYYCAAWLNGGNRWGQGTLVTVSS

SEQ ID NO: 1340 - protein, 123 aa, synthetic construct
EVQLVESGGGLVQPGGSLRLSCAASGTVFSISDMGWFRQAPGKEREFVAAIYPSGRNAYYADSVKGRFTISADNSKNTAYLQMNSLKPEDTAVYYCAADGVPEYSDYASGPVWGQGTLVTVSS

SEQ ID NO: 1341 - protein, 118 aa, synthetic construct
EVQLVESGGGLVQPGGSLRLSCAASGRTSRSYEMGWFRQAPGKEREFVAAIDWDGSRTQYADSVKGRFTISADNSKNTAYLQMNSLKPEDTAVYYCAVPRETGWDGDWGQGTLVTVSS

SEQ ID NO: 1342 - protein, 120 aa, synthetic construct
EVQLVESGGGLVQPGGSLRLSCAASGRIFSTYFMGWFRQAPGKEREFVAAIYWSNGKTQYADSVKGRFTISADNSKNTAYLQMNSLKPEDTAVYYCAAVYVSTWGNGYDWGQGTLVTVSS

SEQ ID NO: 1343 - protein, 117 aa, synthetic construct
EVQLLESGGGLVQPGGSLRLSCAASGFMFSWYDMGWVRQAPGKGLEWVSSIDWHGWVTYYADSVKGRFTISRDNSKNTLYLQMNSLRAEDTAVYYCAKAYYGGFDYWGQGTLVTVSS

SEQ ID NO: 1344 - protein, 116 aa, synthetic construct
EVQLLESGGGLVQPGGSLRLSCAASGFDFSDYEMSWVRQAPGKGLEWVSSITSEGGSTYYADSVKGRFTISRDNSKNTLYLQMNSLRAEDTAVYYCAKPDVLFDYWGQGTLVTVSS

SEQ ID NO: 1345 - protein, 117 aa, synthetic construct
EVQLLESGGGLVQPGGSLRLSCAASGGYNFRDYMHWVRQAPGKGLEWVSSIGRHGGRTYYADSVKGRFTISRDNSKNTLYLQMNSLRAEDTAVYYCAKDLGQGFDYWGQGTLVTVSS

SEQ ID NO: 1346 - protein, 116 aa, synthetic construct
EVQLLESGGGLVQPGGSLRLSCAASGFDFSDYEMSWVRQAPGKGLEWVSSITSEGGSTYYADSVKGRFTISRNNSKNTLYLQMNSLRAEDTAVYYCAKPDVLFDYWGQGTLVTVSS

SEQ ID NO: 1347 - protein, 116 aa, synthetic construct; identical to SEQ ID NO: 1344

SEQ ID NO: 1348 - protein, 116 aa, synthetic construct; identical to SEQ ID NO: 1344

SEQ ID NO: 1349 - protein, 119 aa, synthetic construct
EVQLLESGGGLVQPGGSLRLSCAASGGYNFRDYMHWVRQAPGKGLEWVAEIRNKANNHATKYADSVKGRFTISRDNSKNTLYLQMNSLRAEDTAVYYCAKNLGQGFDYWGQGTLVTVSS

SEQ ID NO: 1350 - protein, 117 aa, synthetic construct
EVQLLESGGGLVQPGGSLRLSCAASGGYNFRDYMHWVRQAPGKGLEWVSSINDRGDQTYYADSVEGRFTISRDNSKNTLYLQMNSLRAEDTAVYYCAKNLGQGFDYWGQGTLVTVSS

SEQ ID NO: 1351 - protein, 116 aa, synthetic construct; identical to SEQ ID NO: 1344

SEQ ID NO: 1352 - protein, 116 aa, synthetic construct; identical to SEQ ID NO: 1344

SEQ ID NO: 1353 - protein, 116 aa, synthetic construct; identical to SEQ ID NO: 1344

SEQ ID NO: 1354 - protein, 117 aa, synthetic construct
EVQLLESGGGLVQPGGSLRLSCAASGGYNFRDYMHWVRQAPGKGLEWVSSISNSGGSTYYADSVKGRFTISRDNSKNTLYLQMNSLRAEDTAVYYCAKNLGQGFDYWGQGTLVTVSS

SEQ ID NO: 1355 - protein, 116 aa, synthetic construct; identical to SEQ ID NO: 1344

SEQ ID NO: 1356 - protein, 116 aa, synthetic construct; identical to SEQ ID NO: 1344

SEQ ID NO: 1357 - protein, 117 aa, synthetic construct
EVQLLESGGGLVQPGGSLRLSCAASGGYNFKDYMHWVRQAPGKGLEWVSSIGRHGGRTYYADSVKGRFTISRDNSKNTLYLQMNSLRAEDTAVYYCAKDLGQGFDYWGQGTLVTVSS

SEQ ID NO: 1358 - protein, 116 aa, synthetic construct
EVQLLESGGGLVQPGGSLRLSCAASGFDFSDYEMSWVRQAPGKGLEWVSSITSEGGSTYYADSVKGRFTISRDNSKNTLYLQMNSLRAEDTAVYYCAKPDQFFDYWGQGTLVTVSS

SEQ ID NO: 1359 - protein, 116 aa, synthetic construct; identical to SEQ ID NO: 1344

SEQ ID NO: 1360 - protein, 117 aa, synthetic construct
EVQLLESGGGLVQPGGSLRLSCAASGGYNFRDYMHWVRQAPGKGLEWVATISGGGINTYYPDSVKGRFTISRDNSKNTLYLQMNSLRAEDTAVYYCAKDLGQGFDYWGQGTLVTVSS

SEQ ID NO: 1361 - protein, 116 aa, synthetic construct
EVQLLESGGGLVQPGGSLRLSCAASGFDFSDYEMSWVRQAPGKGLEWVSSITSEGGSTYYADSVKGRFTISRDNSKNTLYLQMNSLRAEDTAVYYCAKPGRLFDYWGQGTLVTVSS

SEQ ID NO: 1362 - protein, 116 aa, synthetic construct
EVQLLESGGGLVQPGGSLRLSCAASGFDFSDYEMSWVRQAPGKGLEWVSSITSEGGSTYYADSVKGRFTISRDNSKNTLYLQMNSLRAEDTAVYYCAKPDKDFDYWGQGTLVTVSS

SEQ ID NO: 1363 - protein, 121 aa, synthetic construct
EVQLLESGGGLVQPGGSLRLSCAASGFMFSWYDMGWVRQAPGKGLEWVSAISGSGGGTSYADSVKGRFTISRDNSKNTLYLQMNSLRAEDTAVYYCAKHSKSSHRQSFDYWGQGTLVTVSS

SEQ ID NO: 1364 - protein, 116 aa, synthetic construct
EVQLLESGGGLVQPGGSLRLSCAASGFTFASYEMTWVRQAPGKGLEWVSSITSEGGSTYYADSVKGRFTISRDNSKNTLYLQMNSLRAEDTAVYYCAKPDVLFDYWGQGTLVTVSS

SEQ ID NO: 1365 - protein, 116 aa, synthetic construct
EVQLLESGGGLVQPGGSLRLSCAASGFTFEDYQMGWVRQAPGKGLEWVSSITSEGGSTYYADSVKGRFTISRDNSKNTLYLQMNSLRAEDTAVYYCAKPGRDFDYWGQGTLVTVSS

SEQ ID NO: 1366 - protein, 116 aa, synthetic construct; identical to SEQ ID NO: 1344

SEQ ID NO: 1367 - protein, 116 aa, synthetic construct; identical to SEQ ID NO: 1344

SEQ ID NO: 1368 - protein, 116 aa, synthetic construct
EVQLLESGGGLVQPGGSLRLSCAASGFDFSDYEMSWVRQAPGKGLEWVSSITSEGGSTYYADSVKGRFTISRDNSKNTLYLQMNSLRAEDTAVYYCAKPGVLFDYWGQGTLVTVSS

SEQ ID NO: 1369 - protein, 117 aa, synthetic construct
EVQLLESGGGLVQPGGSLRLSCAASGGYNFRDYMHWVRQAPGKGLEWVSYISSSGSSTYYADSVKGRFTISRDNSKNTLYLQMNSLRAEDTAVYYCAKNLGQGFDYWGQGTLVTVSS

SEQ ID NO: 1370 - protein, 117 aa, synthetic construct
EVQLLESGGGLVQPGGSLRLSCAASGGYNFRDYMHWVRQAPGKGLEWVSSIVSSGGLTLYADSVKGRFTISRDNSKNTLYLQMNSLRAEDTAVYYCAKDLGQGFDYWGQGTLVTVSS

SEQ ID NO: 1371 - protein, 116 aa, synthetic construct; identical to SEQ ID NO: 1361

SEQ ID NO: 1372 - protein, 116 aa, synthetic construct
EVQLLESGGGLVQPGGSLRLSCAASGFDFSDYEMSWVRQAPGKGLEWVSSITSEGGSTYYADSVKGRFTISRDNSKNTLYLQMNSLRAEDTAVYYCAKPDQFLDYWGQGTLVTVSS

SEQ ID NO: 1373 - protein, 116 aa, synthetic construct; identical to SEQ ID NO: 1344

SEQ ID NO: 1374 - protein, 116 aa, synthetic construct
EVQLLESGGGLVQPGGSLRLSCAASGFDFSDYEMSWVRQAPGKGLEWVSSITSEGGSTYYADSVKGRFTISRDNSKNTLYLQMNSLRAEDTAVYYCAKPGKNFDYWGQGTLVTVSS

SEQ ID NO: 1375 - protein, 116 aa, synthetic construct
EVQLLESGGGLVQPGGSLRLSCAASGFTFASYEMTWVRQAPGKGLEWVSSITSEGGSTYYADSVKGRFTISRDNSKNTLYLQMNSLRAEDTAVYYCAKPDQFFDYWGQGTLVTVSS

SEQ ID NO: 1376 - protein, 116 aa, synthetic construct
EVQLLESGGGLVQPGGSLRLSCAASGFDFSDYEMSWVRQAPGKGLEWVSSITSEGGSTYYADSVKGRFTISRDNSKNTLYLQMNSLRAEDTAVYYCAKPDKTFDYWGQGTLVTVSS

SEQ ID NO: 1377 - protein, 120 aa, synthetic construct
EVQLLESGGGLVQPGGSLRLSCAASGFDFSDYEMSWVRQAPGKGLEWVSVISSSGGETSYADSVKGRFTISRDNSKNTLYLQMNSLRAEDTAVYYCAREYYGYGYALDYWGQGTLVTVSS

SEQ ID NO: 1378 - protein, 116 aa, synthetic construct; identical to SEQ ID NO: 1344

SEQ ID NO: 1379 - protein, 116 aa, synthetic construct; identical to SEQ ID NO: 1344

SEQ ID NO: 1380 - protein, 116 aa, synthetic construct; identical to SEQ ID NO: 1362

SEQ ID NO: 1381 - protein, 116 aa, synthetic construct
EVQLLESGGGLVQPGGSLRLSCAASGFTFEDTEMDWVRQAPGKGLEWVSSITSEGGSTYYADSVKGRFTISRDNSKNTLYLQMNSLRAEDTAVYYCAKPDVLFDYWGQGTLVTVSS

SEQ ID NO: 1382 - protein, 116 aa, synthetic construct; identical to SEQ ID NO: 1361

SEQ ID NO: 1383 - protein, 116 aa, synthetic construct; identical to SEQ ID NO: 1344

SEQ ID NO: 1384 - protein, 116 aa, synthetic construct
EVQLLESGGGLVQPGGSLRLSCAASGFDFSDYEMSWVRQAPGKGLEWVSSITSEGGSTYYADSVKGRFTISRDNSKNTLYLQMNSLRAEDTAVYYCAKPGRDFDYWGQGTLVTVSS

SEQ ID NO: 1385 - protein, 116 aa, synthetic construct; identical to SEQ ID NO: 1344

SEQ ID NO: 1386 - protein, 116 aa, synthetic construct
EVQLLESGGGLVQPGGSLRLSCAASGFDFSDYEMSWVRQAPGKGLEWVSSITSEGGSTYYADSVKGRFTISRDNSKNTLYLQMNSLRSEDTAVYYCAKPDVLFDYWGQGTLVTVSS

SEQ ID NO: 1387 - protein, 116 aa, synthetic construct; identical to SEQ ID NO: 1364

SEQ ID NO: 1388 - protein, 116 aa, synthetic construct; identical to SEQ ID NO: 1364

SEQ ID NO: 1389 - protein, 116 aa, synthetic construct; identical to SEQ ID NO: 1364

SEQ ID NO: 1390 - protein, 119 aa, synthetic construct; identical to SEQ ID NO: 1349

SEQ ID NO: 1391 - protein, 116 aa, synthetic construct; identical to SEQ ID NO: 1344

SEQ ID NO: 1392 - protein, 116 aa, synthetic construct; identical to SEQ ID NO: 1344

SEQ ID NO: 1393 - protein, 116 aa, synthetic construct; identical to SEQ ID NO: 1344

SEQ ID NO: 1394 - protein, 116 aa, synthetic construct
EVQLLESGGGLVQPGGSLRLSCAASGFTFEDTEMDWVRQAPGKGLEWVSSITSEGGSTYYADSVKGRFTISRDNSKNTLYLQMNSLRAEDTAVYYCAKPDKDFDYWGQGTLVTVSS

SEQ ID NO: 1395 - protein, 116 aa, synthetic construct
EVQLLESGGGLVQPGGSLRLSCAASGFTFASYEMTWVRQAPGKGLEWVSSITSEGGSTYYADSVKGRFTISRDNSKNTLYLQMNSLRAEDTAVYYCAKPDKDFDYWGQGTLVTVSS

SEQ ID NO: 1396 - protein, 116 aa, synthetic construct; identical to SEQ ID NO: 1364

SEQ ID NO: 1397 - protein, 117 aa, synthetic construct; identical to SEQ ID NO: 1360

SEQ ID NO: 1398 - protein, 119 aa, synthetic construct; identical to SEQ ID NO: 1349

SEQ ID NO: 1399 - protein, 121 aa, synthetic construct
EVQLLESGGGLVQPGGSLRLSCAASGFDFSDYEMSWVRQAPGKGLEWVSAISGSGGGTSYADSVKGRFTISRDNSKNTLYLQMNSLRAEDTAVYYCAKHSKSSHRQSFDYWGQGTLVTVSS

SEQ ID NO: 1400 - protein, 116 aa, synthetic construct; identical to SEQ ID NO: 1344

SEQ ID NO: 1401 - protein, 116 aa, synthetic construct; identical to SEQ ID NO: 1381

SEQ ID NO: 1402 - protein, 116 aa, synthetic construct; identical to SEQ ID NO: 1395

SEQ ID NO: 1403 - protein, 116 aa, synthetic construct; identical to SEQ ID NO: 1358

SEQ ID NO: 1404 - protein, 116 aa, synthetic construct
EVQLLESGGGLVQPGGSLRLSCAASGFTFASYEMTWVRQAPGKGLEWVSSITSEGGSTYYADSVKGRFTISRDNSKNTLYLQMNSLRAEDTAVYYCAKPDKIFDYWGQGTLVTVSS

SEQ ID NO: 1405 - protein, 116 aa, synthetic construct; identical to SEQ ID NO: 1344

SEQ ID NO: 1406 - protein, 116 aa, synthetic construct; identical to SEQ ID NO: 1358

SEQ ID NO: 1407 - protein, 117 aa, synthetic construct
EVQLLESGGGLVQPGGSLRLSCAASGGYNFRDYMHWVRQAPGKGLEWVSSITSEGGSTYYADSVKGRFTISRDNSKNTLYLQMNSLRAEDTAVYYCAKDLGQGFDYWGQGTLVTVSS

SEQ ID NO: 1408 - protein, 116 aa, synthetic construct
EVQLLESGGGLVQPGGSLRLSCAASGFDFSDYEMSWVRQAPGKGLEWVSSITSEGGSAYYADSVKGRFTISRDNSKNTLYLQMNSLRAEDTAVYYCAKPGRLFDYWGQGTLVTVSS

SEQ ID NO: 1409 - protein, 116 aa, synthetic construct
EVQLLESGGGLVQPGGSLRLSCAASGFDFSDYEMSWVRQAPGKGMEWVSSITSEGGSTYYADSVKGRFTISRDNSKNTLYLQMNSLRAEDTAVYYCAKPDVLFDYWGQGTLVTVSS

SEQ ID NO: 1410 - protein, 116 aa, synthetic construct
EVQLLESGGGLVQPGGSLRLSCAASGFTFEDYQMGWVRQAPGKGLEWVSSITSEGGSTYYADSVKGRFTISRDNSKNTLYLQMNSLRAEDTAVYYCAKPDKDFDYWGQGTLVTVSS

SEQ ID NO: 1411 - protein, 116 aa, synthetic construct
EVQLLESGGGLVQPGGSLILSCAASGFTFASYEMTWVRQAPGKGLEWVSSITSEGGSTYYADSVKGRFTISRDNSKNTLYLQMNSLRAEDTAVYYCAKPDVLFDYWGQGTLVTVSS

SEQ ID NO: 1412 - protein, 118 aa, synthetic construct
EVQLLESGGGLVQPGGSLRLSCAASGFTFGTYYMGWVRQAPGKGLEWVSSISPSGGWTEYADSVKGRFTISRDNSKNTLYLQMNSLRAEDTAVYYCARGGDYGSGDYWGQGTLVTVSS

SEQ ID NO: 1413 - protein, 116 aa, synthetic construct
EVQLLESGGGLVQPGGSLRLSCAASGFTFEDTEMDWVRQAPGKGLEWVSSITSEGGSTYYADSVKGRFTISRDNSKNTLYLQMNSLRAEDTAVYYCAKPDKTFDYWGQGTLVTVSS

SEQ ID NO: 1414 - protein, 116 aa, synthetic construct; identical to SEQ ID NO: 1410

SEQ ID NO: 1415 - protein, 116 aa, synthetic construct
EVQLLESGGGLVQPGGSLRLSCAASGGYNFRDYHWVRQAPGKGLEWVSYISSSGSSTYYADSVKGRFTISRDNSKNTLYLQMNSLRAEDTAVYYCAKNLGQGFDYWGQGTLVTVSS

SEQ ID NO: 1416 - protein, 116 aa, synthetic construct
EVQLLESGGGLVQPGGSLRLSCAASGFTFEDTEMDWVRQAPGKGLEWVSSITSEGGSTYYADSVKGRFTISRDNSKNTLYLQMNSLRAEDTAVYYCAKPGVLFDYWGQGTLVTVSS

SEQ ID NO: 1417 - protein, 116 aa, synthetic construct
EVQLLESGGGLVQPGGSLRLSCAASGGYNFRDYHWVRQAPGKGLEWVSSITSEGGSTYYADSVKGRFTISRDNSKNTLYLQMNSLRAEDTAVYYCAKDLGQGFDYWGQGTLVTVSS

SEQ ID NO: 1418 - protein, 116 aa, synthetic construct
EVQLLESGGGLVQPGGSLRLSCAASGFDFSDYEMSWVRQAPGKGLEWVSSITSEGGSTYYADSVKGRFTISRDNSKNTLYLQMNSLRAEDTAVYYCAKPDLYFDYWGQGTLVTVSS

SEQ ID NO: 1419 - protein, 117 aa, synthetic construct
EVQLLESGGGLVQPGGSLRLSCAASGFTFEQTDMHWVRQAPGKGLEWVSGIAAYGISTYYADSVKGRFTISRDNSKNTLYLQMNSLRAEDTAVYYCARAGRILFDYWGQGTLVTVSS

SEQ ID NO: 1420 - protein, 116 aa, synthetic construct; identical to SEQ ID NO: 1410

SEQ ID NO: 1421 - protein, 116 aa, synthetic construct
EVQLLESGGGLVQPGGSLRLSCAASGFDFSDYEMSWVRQAPGKGLEWVSSITSEGGSTYYADSVKGRFTISRDNSKNTLYLQMNSLRAEDTAVYYCAKPGVWFDYWGQGTLVTVSS

SEQ ID NO: 1422 - protein, 118 aa, synthetic construct
EVQLLESGGGLVQPGGSLRLSCAASGGYNFRDYHWVRQAPGKGLEWVAEIRNKANNHATKYADSVKGRFTISRDNSKNTLYLQMNSLRAEDTAVYYCAKNLGQGFDYWGQGTLVTVSS

SEQ ID NO: 1423 - protein, 116 aa, synthetic construct; identical to SEQ ID NO: 1421

SEQ ID NO: 1424 - protein, 118 aa, synthetic construct; identical to SEQ ID NO: 1422

SEQ ID NO: 1425 - protein, 116 aa, synthetic construct
EVQLLESGGGLVQPGGSLRLSCAASGGYNFRDYHWVRQAPGKGLEWVATISGGGINTYYPDSVKGRFTISRDNSKNTLYLQMNSLRAEDTAVYYCAKDLGQGFDYWGQGTLVTVSS

SEQ ID NO: 1426 - protein, 118 aa, synthetic construct
EVQLLESGGGLVQPGGSLRLSCAASGFIFQWYDMGWVRQAPGKGLEWVSSINDRGDQTYYADSVKGRFTISRDNSKNTLYLQMNSLRAEDTAVYYCARVAFSGSFDYWGQGTLVTVSS

SEQ ID NO: 1427 - protein, 116 aa, synthetic construct
EVQLLESGGGLVQPGGSLRLSCAASGFDFSDYEMPWVRQAPGKGLEWVSSITSEGGSTYYADSVKGRFTISRDNSKNTLYLQMNSLRAEDTAVYYCAKPDVLFDYWGQGTLVTVSS

SEQ ID NO: 1428 - protein, 117 aa, synthetic construct
EVQLLESGGGLVQPGGSLRLSCAASGGYNFRDYMHWVRQAPGKGLEWVSSISDHGFNTYYADSVKGRFTISRDNSKNTLYLQMNSLRAEDTAVYYCAKNLGQGFDYWGQGTLVTVSS

SEQ ID NO: 1429 - protein, 116 aa, synthetic construct; identical to SEQ ID NO: 1411

SEQ ID NO: 1430 - protein, 116 aa, synthetic construct; identical to SEQ ID NO: 1410

SEQ ID NO: 1431 - protein, 116 aa, synthetic construct
EVQLLESGGGLVQPGGSLRLSCAASGGYNFRDYHWVRQAPGKGLEWVSSIWPSGGQTWYADSVKGRFTISRDNSKNTLYLQMNSLRAEDTAVYYCAKNLGQGFDYWGQGTLVTVSS

SEQ ID NO: 1432 - protein, 117 aa, synthetic construct
EVQLLESGGGLVQPGGSLRLSCAASGFDFSDYEMSWVRQAPGKGLEWVSSITSEGGSTYYADSVKGRFTISRDNSKNTLYLQMNSLRAEDTAVYYCAKNLGQGFDYWGQGTLVTVSS

SEQ ID NO: 1433 - protein, 116 aa, synthetic construct
EVQLLESGGGLVQPGGSLRLSCAASGFTFKAYEMGWVRQAPGKGLEWVSSITSEGGSTYYADSVKGRFTISRDNSKNTLYLQMNSLRAEDTAVYYCAKPDVLFDYWGQGTLVTVSS

SEQ ID NO: 1434 - protein, 116 aa, synthetic construct; identical to SEQ ID NO: 1421

SEQ ID NO: 1435 - protein, 116 aa, synthetic construct
EVQLLESGGGLVQPGGSLRLSCAASGFTFASYEMTWVRQAPGKGLEWVSSITSEGGSTYYADSVKGRFTISRDNSKNTLYLQMNSLRAEDTAVYYCAKPDKTFDYWGQGTLVTVSS

SEQ ID NO: 1436 - protein, 116 aa, synthetic construct
EVQLLESGGGLVQPGGSLRLSCAASGFTFDNSEMDWVRQAPGKGLEWVSSITSEGGSTYYADSVKGRFTISRDNSKNTLYLQMNSLRAEDTAVYYCAKPDVLFDYWGQGTLVTVSS

SEQ ID NO: 1437 - protein, 117 aa, synthetic construct
EVQLLESGGGLVQPGGSLRLSCAASGFIFQWYDMGWVRQAPGKGLEWVSSIDWRGLLTYYADSVKGRFTISRDNSKNTLYLQMNSLRAEDTAVYYCAKAYYGGFDYWGQGTLVTVSS

SEQ ID NO: 1438 - protein, 118 aa, synthetic construct; identical to SEQ ID NO: 1422

SEQ ID NO: 1439 - protein, 116 aa, synthetic construct
EVQLLESGGGLVQPGGSLRLSCAASGFTFEDTEMDWVRQAPGKGLEWVSSITSEGGSTYYADSVKGRFTISRDNSKNTLYLQMNSLRAEDTAVYYCAKPDQFFDYWGQGTLVTVSS

SEQ ID NO: 1440 - protein, 118 aa, synthetic construct; identical to SEQ ID NO: 1422

SEQ ID NO: 1441 - protein, 116 aa, synthetic construct
EVQLLESGGGLVQPGGSLRLSCAASGFDFSDYEMSWVRQAPGKGLEWVSGIADDFTSTYYADSVKGRFTISRDNSKNTLYLQMNSLRAEDTAVYYCAKPGKNFDYWGQGTLVTVSS

SEQ ID NO: 1442 - protein, 116 aa, synthetic construct; identical to SEQ ID NO: 1410

SEQ ID NO: 1443 - protein, 116 aa, synthetic construct
EVQLLESGGGLVQPGGSLRLSCAASGFDFSDYEMSWVRQAPGKGLEWVSSITSEGGSTYYADSVKGRFTISRDNSKNTLYLQMNSLRAEDTAVYYCAKPDRAFDYWGQGTLVTVSS

SEQ ID NO: 1444 - protein, 116 aa, synthetic construct
EVQLLESGGGLVQPGGSLRLSCAASGFTFSEYGMWWVRQAPGKGLEWVSSISGYGSTTYYADSVKGRFTISRDNSKNTLYLQMNSLRAEDTAVYYCARWTSGLDYWGQGTLVTVSS

SEQ ID NO: 1445 - protein, 118 aa, synthetic construct
EVQLLESGGGLVQPGGSLRLSCAASGGYNFRDYHWVRQAPGKGLEWVAEIRNKANNHATKYADSVKGRFTISRDNSKNTLYLQMNSLRAEDTAVYYCAKDLGQGFDYWGQGTLVTVSS

SEQ ID NO: 1446 - protein, 117 aa, synthetic construct
EVQLLESGGGLVQPGGSLRLSCAASGFDFSDYEMSWVRQAPGKGLEWVATISGGGINTYYPDSVKGRFTISRDNSKNTLYLQMNSLRAEDTAVYYCAKDLGQGFDYWGQGTLVTVSS

SEQ ID NO: 1447 - protein, 116 aa, synthetic construct; identical to SEQ ID NO: 1435

SEQ ID NO: 1448 - protein, 116 aa, synthetic construct
EVQLVESGGGLVQPGGSLRLSCAASGFTFEDTEMDWVRQAPGKGLEWVSSITSEGGSTYYADSVKGRFTISRDNSKNTLYLQMNSLRAEDTAVYYCAKPDVLFDYWGQGTLVTVSS

SEQ ID NO: 1449 - protein, 116 aa, synthetic construct
EVQLLESGGGLVQPGGSLRLSCAASGFTFASYEMTWVRQAPGKGLEWVSSITSEGGSTYYADSVKGRFTISRDNSKNTLYLQMNSLRAEDTAVYYCAKPGRLFDYWGQGTLVTVSS

SEQ ID NO: 1450 - protein, 116 aa, synthetic construct; identical to SEQ ID NO: 1436

SEQ ID NO: 1451 - protein, 117 aa, synthetic construct
EVQLLESGGGLVQPGGSLRLSCAASGGYNFRDYMHWVRQAPGKGLEWVSAISGSGGGTSYADSVKGRFTISRDNSKNTLYLQMNSLRAEDTAVYYCAKNLGQGFDYWGQGTLVTVSS

SEQ ID NO: 1452 - protein, 116 aa, synthetic construct
EVQLLESGGGLVQPGGSLRLSCAASGFTFEDTEMDWVRQAPGKGLEWVSSITSEGGSTYYADSVKGRFTISRDNSKNTLYLQMNSLRAEDTAVYYCAKPGRDFDYWGQGTLVTVSS

SEQ ID NO: 1453 - protein, 116 aa, synthetic construct
EVQLLESGGGLVQPGGSLRLSCAASGGYNFRDYMHWVRQAPGKGLEWVGKINYAGNTDYNDSVKGRFTISRDNSKNTLYLQMNSLRAEDTAVYYCAKNLGQGFDYWGQGTLVTVSS

SEQ ID NO: 1454 - protein, 116 aa, synthetic construct
EVQLLESGGGLVQPGGSLRLSCAASGGYNFRDYHWVRQAPGKGLEWVARLAWNGGSTDYADSVKGRFTISRDNSKNTLYLQMNSLRAEDTAVYYCAKDLGQGFDYWGQGTLVTVSS

SEQ ID NO: 1455 - protein, 116 aa, synthetic construct
EVQLLESGGGLVQPGGSLRLSCAASGGYNFRDYHWVRQAPGKGLEWVSSISNSGGSTYYADSVKGRFTISRDNSKNTLYLQMNSLRAEDTAVYYCAKNLGQGFDYWGQGTLVTVSS

SEQ ID NO: 1456 - protein, 116 aa, synthetic construct; identical to SEQ ID NO: 1443

SEQ ID NO: 1457 - protein, 117 aa, synthetic construct
EVQLLESGGGLVQPGGSLRLSCAASGFTFNKYPMMWVRQAPGKGLEWVARLAWNGGSTDYADSVKGRFTISRDNSKNTLYLQMNSLRAEDTAVYYCAKDLGQGFDYWGQGTLVTVSS

SEQ ID NO: 1458 - protein, 116 aa, synthetic construct
EVQLLESGGGLVQPGGSLRLSCAASGGYNFRDYMHWVRQAPGKGLEWVSSITSEGGSTYYADSVKGRFTISRDNSKNTLYLQMNSLRAEDTAVYYCAKPDVLFDYWGQGTLVTVSS

SEQ ID NO: 1459 - protein, 116 aa, synthetic construct
EVQLLESGGGLVQPGGSLRLSCAASGFDFSDYEMSWVRQATGKGLEWVSSITSEGGSTYYADSVKGRFTISRDNSKNTLYLQMNSLRAEDTAVYYCAKPGRLFDYWGQGTLVTVSS

SEQ ID NO: 1460 - protein, 116 aa, synthetic construct
EVQLLESGGGLVQPGGSLRLSCAASGFTFSKYQMTWVRQAPGKGLEWVSSITSEGGSTYYADSVKGRFTISRDNSKNTLYLQMNSLRAEDTAVYYCAKPDKDFDYWGQGTLVTVSS

SEQ ID NO: 1461 - protein, 116 aa, synthetic construct
EVQLLESGGGLVQPGGSLRLSCAASGFYFSDYEMSWVRQAPGKGLEWVSSITSEGGSTYYADSVKGRFTISRDNSKNTLYLQMNSLRAEDTAVYYCAKPGRDFDYWGQGTLVTVSS

SEQ ID NO: 1462 - protein, 119 aa, synthetic construct
EVQLLESGGGLVQPGGSLRLSCAASGFTFEDYQMGWVRQAPGKGLEWVSSISGYGNVIYYADSVKGRFTISRDNSKNTLYLQMNSLRAEDTAVYYCARAGQWLGDFDYWGQGTLVTVSS

SEQ ID NO: 1463 - protein, 117 aa, synthetic construct
EVQLLESGGGLVQPGGSLRLSCAASGFTFRRYVMGWVRQAPGKGVEWVSAISREGRATYYADSVKGRFTISRDNSKNTLYLQMNSLRAEDTAVYYCAKDLGQGFDYWGQGTLVTVSS

SEQ ID NO: 1464 - protein, 118 aa, synthetic construct; identical to SEQ ID NO: 1422

SEQ ID NO: 1465 - protein, 116 aa, synthetic construct
EVQLLESGGGLVQPGGSLRLSCAASGGYNFRDYHWVRQAPGKGLEWVSSINDRGDQTYYADSVEGRFTISRDNSKNTLYLQMNSLRAEDTAVYYCAKNLGQGFDYWGQGTLVTVSS

SEQ ID NO: 1466 - protein, 116 aa, synthetic construct; identical to SEQ ID NO: 1421

SEQ ID NO: 1467 - protein, 116 aa, synthetic construct
EVQLLESGGGLVQPGGSLRLSCAASGFTFSKYQMTWVRQAPGKGLEWVSSITSEGGSTYYADSVKGRFTISRDNSKNTLYLQMNSLRAEDTAVYYCAKPDKTFDYWGQGTLVTVSS

SEQ ID NO: 1468 - protein, 116 aa, synthetic construct; identical to SEQ ID NO: 1410

SEQ ID NO: 1469 - protein, 116 aa, synthetic construct
EVQLLESGGGLVQPGGSLRLSCAASGFDFSDYEMSWVRQAPGKGLEWVSSITSEGGSTYYADSVKGRFTISRDNSKNTLYLQMNSLRAEDTAVYYCAKPGNKFDYWGQGTLVTVSS

SEQ ID NO: 1470 - protein, 118 aa, synthetic construct; identical to SEQ ID NO: 1422

SEQ ID NO: 1471 - protein, 117 aa, synthetic construct
EVQLLESGGGLVQPGGSLRLSCAASGSTFAGYEVWWVRQAPGKGLEWVSGISPSGGITTYADSVKGRFTISRDNSKNTLYLQMNSLRAEDTAVYYCAKDLGQGFDYWGQGTLVTVSS

SEQ ID NO: 1472 - protein, 116 aa, synthetic construct; identical to SEQ ID NO: 1421

SEQ ID NO: 1473 - protein, 116 aa, synthetic construct
EVQLLESGGGLVQPGGSLRLSCAASGFTFASYEMTWVRQAPGKGLEWVSSITSEGGSTYYADSVKGRFTISRDNSKNTLYLQMNSLRAEDTAVYYCAKPGKNFDYWGQGTLVTVSS

SEQ ID NO: 1474 - protein, 116 aa, synthetic construct; identical to SEQ ID NO: 1439

SEQ ID NO: 1475 - protein, 116 aa, synthetic construct; identical to SEQ ID NO: 1410

SEQ ID NO: 1476 - protein, 116 aa, synthetic construct; identical to SEQ ID NO: 1452

SEQ ID NO: 1477 - protein, 116 aa, synthetic construct
EVQLLESGGGLVQPGGSLRLSCAASGFTFASYEMTWVRQAPGKGLEWVSSITSEGGSTYYADSVKGRFTISRDNSKNTLYLQMNSLRAEDTAVYYCAKPGRDFDYWGQGTLVTVSS

SEQ ID NO: 1478 - protein, 116 aa, synthetic construct
EVQLLESGGGLVQPGGSLRLSCAASGFTFKAYEMGWVRQAPGKGLEWVSSITSEGGSTYYADSVKGRFTISRDNSKNTLYLQMNSLRAEDTAVYYCAKPDKDFDYWGQGTLVTVSS

SEQ ID NO: 1479 - protein, 116 aa, synthetic construct; identical to SEQ ID NO: 1478

SEQ ID NO: 1480 - protein, 116 aa, synthetic construct
EVQLLESGGGLVQPGGSLRLSCAASGFDFSDYEMTWVRQAPGKGLEWVSSITSEGGSTYYADSVKGRFTISRDNSKNTLYLQMNSLRAEDTAVYYCAKPDKDFDYWGQGTLVTVSS

SEQ ID NO: 1481 - protein, 118 aa, synthetic construct
EVQLLESGGGLVQPGGSLRLSCAASGGYNFRDYHWVRQAPGKGLEWVAEIRNKANNHATKYADSMKGRFTISRDNSKNTLYLQMNSLRAEDTAVYYCAKNLGQGFDYWGQGTLVTVSS

SEQ ID NO: 1482 - protein, 116 aa, synthetic construct
EVQLLESGGGLVQPGGSLRLSCAASGFDFSDYEMSWVRQAPGKGLEWVSSITSEGGSTYYADSVKGRFTISRDNSKNTLYLQMNSLRAEDTAVYYCAKPGRSFDYWGQGTLVTVSS

SEQ ID NO: 1483 - protein, 120 aa, synthetic construct
EVQLLESGGGLVQPGGSLRLSCAASGFMFSWYDMGWVRQAPGKGLEWVSAISGSGGGTSYADSVKGRFTISRDNSKNTLYLQMNSLRAEDTAVYYCAREYYGYGYALDYWGQGTLVTVSS

SEQ ID NO: 1484 - protein, 116 aa, synthetic construct
EVQLLESGGGLVQPGGSLRLSCAASGFDFSDYEMSWVRQAPGKGLEWVSSITSEGGSTYYADSVKGRFTISRDNSKNTLYLQMNSLRAEDTAVYYCAKPDVAFDYWGQGTLVTVSS

SEQ ID NO: 1485 - protein, 116 aa, synthetic construct; identical to SEQ ID NO: 1411

SEQ ID NO: 1486 - protein, 116 aa, synthetic construct
EVQLLESGGGLVQPGGSLRLSCAASGGYNFRDYMHWVRQAPGKGLEWVARLAWNGGSTDYADSVKGRFTISRNNSKNTLYLQMNSLRAEDTAVYYCAKPDVLFDYWGQGTLVTVSS

SEQ ID NO: 1487 - protein, 116 aa, synthetic construct
EVQLLESGGGLVQPGGSLRLSCAASGFDFSDYEMSWVRQAPGKGLEWVSSITSEGGSTYYADSVKGRFTISRDNSKNTLYLQMNSLRAEDTAVYYCAKPDRRFDYWGQGTLVTVSS

SEQ ID NO: 1488 - protein, 116 aa, synthetic construct
EVQLLESGGGLVQPGGSLRLSCAASGFDFSDYEMSWVRQAPGKGLEWVSGIADDFTSTYYADSVKGRFTISRDNSKNTLYLQMNSLRAEDTAVYYCAKPGRDFDYWGQGTLVTVSS

SEQ ID NO: 1489 - protein, 116 aa, synthetic construct; identical to SEQ ID NO: 1449

SEQ ID NO: 1490 - protein, 118 aa, synthetic construct
EVQLLESGGGLVQPGGSLRLSCAASGFTFGTYYMGWVRQAPGKGLEWVSIISPLGLSTYYADSVKGRFTISRDNSKNTLYLQMNSLRAEDTAVYYCATAEEEPGYDYWGQGTLVTVSS

SEQ ID NO: 1491 - protein, 116 aa, synthetic construct
EVQLLESGGGLVQPGGSLRLSCAASGFTFYDYQMGWVRQAPGKGLEWVSSITSEGGSTYYADSVKGRFTISRDNSKNTLYLQMNSLRAEDTAVYYCAKPGKNFDYWGQGTLVTVSS

SEQ ID NO: 1492 - protein, 116 aa, synthetic construct
EVQLLESGGGLVQPGGSLRLSCAASGFTFGHYEMGWVRQAPGKGLEWVSSITSEGGSTYYADSVKGRFTISRDNSKNTLYLQMNSLRAEDTAVYYCAKPDVLFDYWGQGTLVTVSS

SEQ ID NO: 1493 - protein, 116 aa, synthetic construct; identical to SEQ ID NO: 1482

SEQ ID NO: 1494 - protein, 116 aa, synthetic construct
EVQLLESGGGLVQPGGSLRLSCAASGFTFEDYQMGWVRQAPGKGLEWVSSITGEGGSTYYADSVKGRFTISRDNSKNTLYLQMNSLRAEDTAVYYCAKPDVLFDYWGQGTLVTVSS

SEQ ID NO: 1495 - protein, 120 aa, synthetic construct
EVQLLESGGGLVQPGGSLRLSCAASGFTFEGYPMSWVRQAPGKGLEWVSIISPLGLSTYYADSVKGRFTISRDNSKNTLYLQMNSLRAEDTAVYYCAKSSDHPQNSFDYWGQGTLVTVSS

SEQ ID NO: 1496 - protein, 116 aa, synthetic construct; identical to SEQ ID NO: 1477

SEQ ID NO: 1497 - protein, 116 aa, synthetic construct
EVQLLESGGGLVQPGGSLRLSCAASGFTFEDTEMDWVRQAPGKGLEWVSSITSEGGSTYYADSVKGRFTISRDNSKNTLYLQMNSLRAEDTAVYYCAKPDRAFDYWGQGTLVTVSS

SEQ ID NO: 1498 - protein, 118 aa, synthetic construct; identical to SEQ ID NO: 1422

SEQ ID NO: 1499 - protein, 116 aa, synthetic construct
EVQLLESGGGLVQPGGSLRLSCAASGFDFSDYEMSWVRQAPGKGLEWVSSITSEGGSTYYADSVKGRFTISRDNSKNTLYLQMNSLRAEDTAVYYCAKPGLKFDYWGQGTLVTVSS

SEQ ID NO: 1500 - protein, 116 aa, synthetic construct
EVQLLESGGGLVQPGGSLRLSCAASGFTFEDYQMGWVRQAPGKGLEWVSSITSEGGSTYYADSVKGRFTISRDNSKNTLYLQMNSLRAEDTAVYYCAKPDRAFDYWGQGTLVTVSS

SEQ ID NO: 1501 - protein, 116 aa, synthetic construct
EVQLLESGGGLVQPGGSLRLSCAASGFTFASYEMTWVRQAPGKGLEWVSSITSEGGSTYYADSVKGRFTISRDNSKNTLYLQMNSLRAEDTAVYYCAKPDVLFDYWGQGTLVTISS

SEQ ID NO: 1502 - protein, 117 aa, synthetic construct
EVQLLESGGGLVQPGGSLRLSCAASGFTFASYEMTWVRQAPGKGLEWVSSITSEGGSTYYADSVKGRFTISRDNSKNTLYLQMNSLRAEDTAVYYCAKNLGQGFDYWGQGTLVTVSS

SEQ ID NO: 1503 - protein, 121 aa, synthetic construct
EVQLLESGGGLVQPGGSLRLSCAASGFTFSNYAMHWVRQAPGKGLEWVSALTGSGGSTYYADSVKGRFTISRDNSKNTLYLQMNSLRAEDTAVYYCTRGGLQDQIGHFQHWGQGTLVTVSS

SEQ ID NO: 1504 - protein, 121 aa, synthetic construct
EVQLLESGGGLVQPGGSLRLSCAASGFTFRNYGMSWVRQAPGKGLEWVSSISGSGGSTYYVDSVKGRFTIYRDNSKNTLYLQMNSLRAEDTAVYYCARPSGTYYDFQVAYWGQGTLVTVSS

SEQ ID NO: 1505 - protein, 121 aa, synthetic construct
EVQLLESGGGLVQPGGSLRLSCAASGFTFSTSAMTWVRQAPGKGLEWVSAISTGGGSTYYTDSVKGRFTISRDNSKNTLYLQMNSLRAEDTAVYYCARFYGDYEPQNFDHWGQGTLVTVSS

SEQ ID NO: 1506 - protein, 119 aa, synthetic construct
EVQLLESGGGLVQPGGSLRLSCAASGFTFGHYAMGWVRQAPGKGLEWVSAISGSGAGTYYADSVKGRFTISRDNSKNTLYLQMNSLRAEDTAVYYCATHDSPYYYIDVWGQGTLVTVSS

SEQ ID NO: 1507 - protein, 121 aa, synthetic construct
EVQLLESGGGLVQPGGSLRLSCAASGFTFDNYGMSWVRQAPGKGLEWVSAISGSGGSTNYADSVKGRFTISRDNSKNTLYLQMNSLRAEDTAVYYCAKDLPAVLPAAMENWGQGTLVTVSS

SEQ ID NO: 1508 - protein, 121 aa, synthetic construct
EVQLLESGGGLVQPGGSLRLSCAASGFSFRSYAMSWVRQAPGKGLEWVSIISGSGGSTSYADSVKGRFTISRDNSKNTLYLQMNSLRAEDTAVYYCARYYFGLSSNWFNPWGQGTLVTVSS

SEQ ID NO: 1509 - protein, 120 aa, synthetic construct
EVQLLESGGGLVQPGGSLRLSCAASGFAFSGYAMSWVRQAPGKGLEWVSAISGSGVSTDYADSVKGRFTISRDNSKNTLYLQMNSLRAEDTAVYYCARDSSGWYEYFQHWGQGTLVTVSS

SEQ ID NO: 1510 - protein, 120 aa, synthetic construct
EVQLLESGGGLVQPGGSLRLSCAASGFTFSKYAMNWVRQAPGKGLEWVSAISGSGESTYYADSVKGRFTISRDNSKNTLYLQMNSLRAEDTAVYYCARAHDYDSMLMDYWGQGTLVTVSS

SEQ ID NO: 1511 - protein, 121 aa, synthetic construct
EVQLLESGGGLVQPGGSLRLSCAASGFTFRSYDMSWVRQAPGKGLEWVSGISASGGSTYYADSVKGRFTISRDNSKNTLYLQMNSLRAEDTAVYYCAKDATSRWYGEIDYWGQGTLVTVSS

SEQ ID NO: 1512 - protein, 123 aa, synthetic construct
EVQLLESGGGLVQPGGSLRLSCAASGFRFGNYAMSWVRQAPGKGLEWVSSITGSGGRTYYADSVKGRFTISRDNSKNTLYLQMNSLRAEDTAVYYCARHVDSRRFAELSIEYWGQGTPVTVSS

SEQ ID NO: 1513 - protein, 122 aa, synthetic construct
EVQLLESGGGLVQPGGSLRLSCAASGFTFSNYAMTWVRQAPGKGLEWVSSISGSGGSTIYADSVKGRFTISRDNSKNTLYLQMNSLRAEDTAVYYCGKAYDTGGWYGGLDNWGQGTLVTVSS

SEQ ID NO: 1514 - protein, 122 aa, synthetic construct
EVQLLESGGGLVQPGGSLRLSCAASGFPFGSYAMSWVRQAPGKGLEWVSVISGSGGTTYFADSVKGRFTISRDNSKNTLYLQMNSLRAEDTAVYYCARDVSSSGWYNRLGYWGQGTLVTVSS

SEQ ID NO: 1515 - protein, 122 aa, synthetic construct
EVQLLESGGGLVQPGGSLRLSCAASGFTFSSYDMNWVRQAPGKGLEWVSGISSGGGFTYYADSVKGRFTISRDNSKNTLYLQMNSLRAEDTAVYYCARDPNPYSSSSSWGYWGQGTLVTVSS

SEQ ID NO: 1516 - protein, 120 aa, synthetic construct
EVQLLESGGGLVQPGGSLRLSCAASGFTFTKYAMNWVRQAPGKGLEWVSAISGSGESTYYADSVKGRFTISRDNSKNTLYLQMNSLRAEDTAVYYCARAHDYDSMLMDYWGQGTLVTVSS

SEQ ID NO: 1517 - protein, 120 aa, synthetic construct; identical to SEQ ID NO: 1510

SEQ ID NO: 1518 - protein, 122 aa, synthetic construct
EVQLLESGGGLVQPGGSLRLSCAASGFTFDDYAMSWVRQAPGKGLEWVSAITGSGSGTSTYYADSVKGRFTISRDNSKNTLYLQMNSLRAEDTAVYYCARHQNYYYYGMDVWGQGTLVTVSS

SEQ ID NO: 1519 - protein, 122 aa, synthetic construct
EVQLLESGGGLVQPGGSLRLSCAASGIHFSNYAMSWVRQAPGKGLEWVSDISGSGGGTYYADSVKGRFTISRDNSKNTLYLQMNSLRAEDTAVYYCAKVNDQNIPVAAFDYWGQGTLVTVSS

SEQ ID NO: 1520 - protein, 120 aa, synthetic construct
EVQLLESGGGLVQPGGSLRLSCAASGFTFRDYAMSWVRQAPGKGLEWVAAISGSGVSTDYADSVKGRFTISRDNSKNTLYLQMNSLRAEDTAVYYCARGLDTAMVPFDYWGQGTLVTVSS

SEQ ID NO: 1521 - protein, 120 aa, synthetic construct; identical to SEQ ID NO: 1510

SEQ ID NO: 1522 - protein, 120 aa, synthetic construct
EVQLLESGGGLVQPGGSLRLSCAASGFTFSKYAMSWVRQAPGKGLEWVSAISGSGSSTYYADSVKGRFTISRDNSKNTLYLQMNSLRAEDTAVYYCARAHDYDSMLMDYWGQGTLVTVSS

SEQ ID NO: 1523 - protein, 119 aa, synthetic construct
EVQLLESGGGLVQPGGSLRLSCAASGFTFTTYAMSWVRQAPGKGLEWVSAISSTGGSTYYADSVKGRFTISRDNSKNTLYLQMNSLRAEDTAVYYCAKGGGYYYNMDVWGRGTLVTVSS

SEQ ID NO: 1524 - protein, 121 aa, synthetic construct
EVQLLESGGGLVQPGGSLRLSCAASGFTFRSYDMTWVRQAPGKGLEWVSGISASGGSTYYADSVKGRFTISRDNSKNTLYLQMNSLRAEDTAVYYCAKDATSHWYGEIYYWGQGTLVTVSS

SEQ ID NO: 1525 - protein, 119 aa, synthetic construct
EVQLLESGGGLVQPGGSLRLSCAASGFTFGSFAMNWVRQAPGKGLEWVSAITGGGGSTYYADSVKGRFTISRDNSKNTLYLQMNSLRAEDTAVYYCAHGLAWRWGFDYWGQGTLVTVSS

SEQ ID NO: 1526 - protein, 120 aa, synthetic construct
EVQLLESGGGLVQPGGSLRLSCAASGFTFSNYAMSWVRQAPGKGLEWVSAITGSGSTTYYADSVKGRFTISRDNSKNTLYLQMNSLRAEDTAVYYCARAHDYDSMLMDYWGQGTLVTVSS

SEQ ID NO: 1527 - protein, 121 aa, synthetic construct
EVQLLESGGGLVQPGGSLRLSCAASGFGFSSYAMSWVRQAPGKGLEWVSAISGGGGSIYYADSVKGRFTISRDNSKNTLYLQMNSLRAEDTAVYYCATDYGDYDRLNFDLWGQGTLVTVSS

SEQ ID NO: 1528 - protein, 128 aa, synthetic construct
EVQLLESGGGLVQPGGSLRLSCAASGFTFRSYAMTWVRQAPGKGLEWVSAISGSGDRTYYGDSVKGRFTISRDNSKNTLYLQMNSLRAEDTAVYYCARIARSEDFWSGYYTDFDFDYWGQGTLVTVSS

SEQ ID NO: 1529 - protein, 120 aa, synthetic construct; identical to SEQ ID NO: 1510

SEQ ID NO: 1530 - protein, 120 aa, synthetic construct; identical to SEQ ID NO: 1510

SEQ ID NO: 1531 - protein, 120 aa, synthetic construct; identical to SEQ ID NO: 1510

SEQ ID NO: 1532 - protein, 121 aa, synthetic construct
EVQLLESGGGLVQPGGSLRLSCAASGFTFSSYAMSWVRQAPGKGLEWVSAISGSGGSTYYADSVKGRFTISRDNSKNTLYLQMNSLRAEDTAVYYCARERGDYYYYGMDVWGQGTLVTVSS

SEQ ID NO: 1533 - protein, 121 aa, synthetic construct
EVQLLESGGGLVQPGGSLRLSCAASGFTFRTYAMGWVRQAPGKGLEWVSAISGSGGIAYYADSVKGRFTISRDNSKNTLYLQMNSLRAEDTAVYYCARHYYYDSSDAFDIWGQGTLVTISS

SEQ ID NO: 1534 - protein, 120 aa, synthetic construct; identical to SEQ ID NO: 1526

SEQ ID NO: 1535 - protein, 121 aa, synthetic construct; identical to SEQ ID NO: 1532

SEQ ID NO: 1536 - protein, 121 aa, synthetic construct; identical to SEQ ID NO: 1527

SEQ ID NO: 1537 - protein, 120 aa, synthetic construct
EVQLLESGGGLVQPGGSLRLSCAASGLTFGSYAMSWVRQAPGKGLEWVSAISGSVGSTYYADSVKGRFTISRDNSKNTLYLQMNSLRAEDTAVYYCARHGGYYYYYMDVWGQGTLVTVSS

SEQ ID NO: 1538 - protein, 121 aa, synthetic construct; identical to SEQ ID NO: 1533

SEQ ID NO: 1539 - protein, 120 aa, synthetic construct
EVQLLESGGGLVQPGGSLRLSCAASGFTFRDYAMNWVRQAPGKGLEWVSAISGSGESTYYADSVKGRFTISRDNSKNTLYLQMNSLRAEDTAVYYCARAHDYDSMLMDYWGQGTLVTVSS

SEQ ID NO: 1540 - protein, 119 aa, synthetic construct
EVQLLESGGGLVQPGGSLRLSCAASGFTSSTYAMSWVRQAPGKGLEWVSAISSTGGSTYYADSVKGRFTISRDNSKNTLYLQMNSLRAEDTAVYYCAKGGGYYYNMDVWGQGTLVTVSS

SEQ ID NO: 1541 - protein, 122 aa, synthetic construct
EVQLLESGGGLVQPGGSLRLSCAASGFSFSSYAMAWVRQAPGKGLEWVSSISGSGGGGNTYYADSVKGRFTISRDNSKNTLYLQMNSLRAEDTAVYYCARHHERDYYGMDVWGQGTLVTVSS

SEQ ID NO: 1542 - protein, 120 aa, synthetic construct
EVQLLESGGGLVQPGGSLRLSCAASGFIFSNYDMSWVRQAPGKGLEWVSGISGSGGSTSYADSVKGRFTISRDNSKNTLYLQMNSLRAEDTAVYYCARHGGYNPYGLDYWGQGTLVTVSS

SEQ ID NO: 1543 - protein, 120 aa, synthetic construct; identical to SEQ ID NO: 1526

SEQ ID NO: 1544 - protein, 119 aa, synthetic construct
EVQLLESGGGLVQPGGSLRLSCAASGFTFSYYGMSWVRQAPGKGLEWVSTISGSTGSTYYADSVKGRFTISRDNSKNTLYLQMNSLRAEDTAVYYCASSPPFYYYMDVWGQGTLVTVSS

SEQ ID NO: 1545 - protein, 121 aa, synthetic construct
EVQLLESGGGLVQPGGSLRLSCAASGFTFSTYAMNWVRQAPGKGLEWVSAISGSGGTTYYADSVKGRFTISRDNSKNTLYLQMNSLRAEDTAVYYCARGPNNWNYVSFDYWGQGTLVTVSS

SEQ ID NO: 1546 - protein, 122 aa, synthetic construct
EVQLLESGGGLVQPGGSLRLSCAASGYTFSSYAMSWVRQAPGKGLEWVSGISGGGTSTYYADSVKGRFTISRDNSKNTLYLQMNSLRAEDTAVYYCARFGNHYDRTGYSDYWGQGTLVTVSS

SEQ ID NO: 1547 - protein, 122 aa, synthetic construct
EVQLLESGGGLVQPGGSLRLSCAASGFTFGRYAMSWVRQAPGKGLEWVSDISGSGGSTYYADSVKGRFTISRDNSKNTLYLQMNSLRAEDTAVYYCARDGFRWGRAEYFQHWGQGTLVTVSS

SEQ ID NO: 1548 - protein, 116 aa, synthetic construct
EVQLLESGGGLVQPGGSLRLSCAASGFTFSSHDMSWVRQAPGKGLEWVSGISGSGYSTYYADSVKGRFTISRDNSKNTLYLQMNSLRAEDTAVYYCARDQGDMDVWGQGTLVTVSS

SEQ ID NO: 1549 - protein, 115 aa, synthetic construct
EVQLLESGGGLVQPGGSLRLSCAASGFTFTSYAMSWVRQAPGKGLEWVSGISGSGINTYYADSVKGRFTISRDNSRNTLYLQMNSLRAEDTAVYYCVRSSWSDVWGQGTLVTVSS

SEQ ID NO: 1550 - protein, 121 aa, synthetic construct
EVQLLESGGGLVQPGGSLRLSCAASGFTFSDYDMSWVRQAPGKGLEWVSGISGSGATTYYADSVKGRFTISRDNSKNTLYLQMNSLRAEDTAVYYCARDSSGSYYYPLDYWGQGTLVTVSS

SEQ ID NO: 1551 - protein, 124 aa, synthetic construct
EVQLLESGGGLVQPGGSLRLSCAASGFTFSPYAMSWVRQAPGKGLEWVSSITGTGGSTYYADSVKGRFTISRDNSKNTLYLQMNSLRAEDTAVYYCARSWASEDFDWLPNFDFWGQGTLVTVSS

SEQ ID NO: 1552 - protein, 120 aa, synthetic construct
EVQLLESGGGLVQPGGSLRLSCAASGFTFSYYAMTWVRQAPGKGLEWVSGISGSGGSSYYADSVKGRFTISRDNSKNTLYLQMNSLRAEDTAVYYCARSHDYDRQTFDYWGQGTLVTVSS

SEQ ID NO: 1553 - protein, 120 aa, synthetic construct
EVQLLESGGGLVQPGGSLRLSCAASGFGFSSYAMSWVRQAPGKGLEWVSAITGSGSTTYYADSVKGRFTISRDNSKNTLYLQMNSLRAEDTAVYYCARAHDYDSMLMDYWGQGTLVTVSS

SEQ ID NO: 1554 - protein, 120 aa, synthetic construct
EVQLLESGGGLVQPGGSLRLSCAASGFTFRTYAMGWVRQAPGKGLEWVSAISGSGGIAYYADSVKGRFTISRDNSKNTLYLQMNSLRAEDTAVYYCARAHDYDSMLMDYWGQGTLVTVSS

SEQ ID NO: 1555 - protein, 121 aa, synthetic construct; identical to SEQ ID NO: 1532

SEQ ID NO: 1556 - protein, 121 aa, synthetic construct; identical to SEQ ID NO: 1532

SEQ ID NO: 1557 - protein, 124 aa, synthetic construct
EVQLLESGGGLVQPGGSLRLSCAASGFTFSSFDMTWVRQAPGKGLEWVSGISGSGGTTFYADSVKGRFTISRDNSKNTLYLQMNSLRAEDTAVYYCVRDVSDIYGYLDDAFDIWGQGTLVTVSS

SEQ ID NO: 1558 - protein, 122 aa, synthetic construct
EVQLLESGGGLVQPGGSLRLSCAASGFTSNIYAMSWVRQAPGKGLEWVSAISGSGFSTYYADSVKGRFTISRDNSKNTLYLQMNSLRAEDTAVYYCAKLAQNYGDPDAFDIWGQGTLVTVSS

SEQ ID NO: 1559 - protein, 120 aa, synthetic construct
EVQLLESGGGLVQPGGSLRLSCAASGFTFTSYAMTWVRQAPGKGLEWVSSITSSGGSTYYADSVKGRFTISRDNSKNTLYLQMNSLRAEDTAVYYCARAHDYDSMLMDYWGQGTLVTVSS

SEQ ID NO: 1560 - protein, 121 aa, synthetic construct; identical to SEQ ID NO: 1533

SEQ ID NO: 1561 - protein, 120 aa, synthetic construct
EVQLLESGGGLVQPGGSLRLSCAASGFTFDTYAMNWVRQAPGKGLEWVSAISGTGGTTYYADSVKGRFTISRDNSKNTLYLQMNSLRAEDTAVYYCAKEGEGYSYGLHYWGQGTLVTVSS

SEQ ID NO: 1562 - protein, 121 aa, synthetic construct
EVQLLESGGGLVQPGGSLRLSCAASGFTFSTNDMSWVRQAPGKGLEWVSAVSGSGGNTYYADSVKGRFTISRDNSKNTLYLQMNSLRAEDTAVYYCVRVSGYSSSWYIDSWGQGTLVTVSS

SEQ ID NO: 1563 - protein, 120 aa, synthetic construct
EVQLLESGGGLVQPGGSLRLSCAASGFTFSSYAMSWVRQAPGKGLEWVSAISASGGTTYYADSVKGRFTISRDNSKNTLYLQMNSLRAEDTAVYYCARSHDYDRQTFDYWGQGTLVTVSS

SEQ ID NO: 1564 - protein, 120 aa, synthetic construct
EVQLLESGGGLVQPGGSLRLSCAASGFTFRSYDMSWVRQAPGKGLEWVSGISASGGSTYYADSVKGRFTISRDNSKNTLYLQMNSLRAEDTAVYYCARAHDYDSMLMDYWGQGTLVTVSS

SEQ ID NO: 1565 - protein, 128 aa, synthetic construct; identical to SEQ ID NO: 1528

SEQ ID NO: 1566 - protein, 119 aa, synthetic construct; identical to SEQ ID NO: 1525

SEQ ID NO: 1567 - protein, 120 aa, synthetic construct
EVQLLESGGGLVQPGGSLRLSCAASGFGFSSYAMSWVRQAPGKGLEWVSAISGGGGSIYYADSVKGRFTISRDNSKNTLYLQMNSLRAEDTAVYYCARAHDYDSMLMDYWGQGTLVTVSS

SEQ ID NO: 1568 - protein, 127 aa, synthetic construct
EVQLLESGGGLVQPGGSLRLSCAASGFTFSSYDMNWVRQAPGKGLEWVAAISGSGGTTYYADSVKGRFTISRDNSKNTLYLQMNSLRAEDTAVYYCARGVYESMTGTYGYVDWFDPWGQGTLVTVSS

SEQ ID NO: 1569 - protein, 121 aa, synthetic construct; identical to SEQ ID NO: 1527

SEQ ID NO: 1570 - protein, 120 aa, synthetic construct; identical to SEQ ID NO: 1526

SEQ ID NO: 1571 - protein, 120 aa, synthetic construct; identical to SEQ ID NO: 1526

SEQ ID NO: 1572 - protein, 120 aa, synthetic construct; identical to SEQ ID NO: 1526

SEQ ID NO: 1573 - protein, 121 aa, synthetic construct; identical to SEQ ID NO: 1532

SEQ ID NO: 1574 - protein, 121 aa, synthetic construct; identical to SEQ ID NO: 1532

SEQ ID NO: 1575 - protein, 121 aa, synthetic construct; identical to SEQ ID NO: 1533

SEQ ID NO: 1576 - protein, 121 aa, synthetic construct
EVQLLESGGGLVQPGGSLRLSCAASGFTFSKYAMNWVRQAPGKGLEWVSAISGSGESTYYADSVKGRFTISRDNSKNTLYLQMNSLRAEDTAVYYCTRGGLQDQIGHFQHWGQGTLVTVSS

SEQ ID NO: 1577 - protein, 120 aa, synthetic construct; identical to SEQ ID NO: 1542

SEQ ID NO: 1578 - protein, 120 aa, synthetic construct; identical to SEQ ID NO: 1537

SEQ ID NO: 1579 - protein, 124 aa, synthetic construct; identical to SEQ ID NO: 1557

SEQ ID NO: 1580 - protein, 121 aa, synthetic construct; identical to SEQ ID NO: 1532

SEQ ID NO: 1581 - protein, 124 aa, synthetic construct
EVQLLESGGGLVQPGGSLRLSCAASGFTFSDYVMGWVRQAPGKGLEWVSAISGSGGSTYYTDSVKGRFTISRDNSKNTLYLQMNSLRAEDTAVYYCAKDAGRGSAWYGYAFDIWGQGTLVTVSS

SEQ ID NO: 1582 - protein, 120 aa, synthetic construct
EVQLLESGGGLVQPGGSLRLSCAASGFTFSYYGMSWVRQAPGKGLEWVSAISGSGESTYYADSVKGRFTISRDNSKNTLYLQMNSLRAEDTAVYYCARAHDYDSMLMDYWGQGTLVTVSS

SEQ ID NO: 1583 - protein, 122 aa, synthetic construct; identical to SEQ ID NO: 1541

SEQ ID NO: 1584 - protein, 120 aa, synthetic construct
EVQLLESGGGLVQPGGSLRLSCAASGVTFRNYAMSWVRQAPGKGLEWVSAISGSGSSTFYADSVKGRFTISRDNSKNTLYLQMNSLRAEDTAVYYCARGSLAYDYIADYWGQGTLVTVSS

SEQ ID NO: 1585 - protein, 120 aa, synthetic construct; identical to SEQ ID NO: 1526

SEQ ID NO: 1586 - protein, 120 aa, synthetic construct
EVQLLESGGGLVQPGGSLRLSCAASGLTFGSYAMSWVRQAPGKGLEWVSAISGSVGSTYYADSVKGRFTISRDNSKNTLYLQMNSLRAEDTAVYYCARAHDYDSMLMDYWGQGTLVTVSS

SEQ ID NO: 1587 - protein, 121 aa, synthetic construct; identical to SEQ ID NO: 1545

SEQ ID NO: 1588 - protein, 128 aa, synthetic construct
EVQLLESGGGLVQPGGSLRLSCAASGFTFGNYAMTWVRQAPGKGLEWVSAISGLGGSTYYADSVKGRFTISRDNSKNTLYLQMNSLRAEDTAVYYCTSSDPTYYYDSNGKSSLGMDVWGQGTLVTVSS

SEQ ID NO: 1589 - protein, 119 aa, synthetic construct; identical to SEQ ID NO: 1540

SEQ ID NO: 1590 - protein, 121 aa, synthetic construct
EVQLLESGGGLVQPGGSLRLSCAASGFTFRNYGMNWVRQAPGKGLEWVSSISGSGDYTYYADSVKGRFTISRDNSKNTLYLQMNSLRAEDTAVYYCARGLTYDILPRFDSWGQGTLVTVSS

SEQ ID NO: 1591 - protein, 121 aa, synthetic construct; identical to SEQ ID NO: 1533

SEQ ID NO: 1592 - protein, 121 aa, synthetic construct; identical to SEQ ID NO: 1532

SEQ ID NO: 1593 - protein, 121 aa, synthetic construct
EVQLLESGGGLVQPGGSLRLSCAASGFTFSNYAMHWVRQAPGKGLEWVSAISGSGGIAYYADSVKGRFTISRDNSKNTLYLQMNSLRAEDTAVYYCARHYYYDSSDAFDIWGQGTLVTISS

SEQ ID NO: 1594 - protein, 121 aa, synthetic construct
EVQLLESGGGLVQPGGSLRLSCAASGFTFTSYSMSWVRQAPGKGLEWVSGISGSGGSTHYVDSVKGRFTISRDNSKNTLYLQMNSLRAEDTAVYYCARRSYFSSGSALDYWGQGTLVTVSS

SEQ ID NO: 1595 - protein, 122 aa, synthetic construct; identical to SEQ ID NO: 1546

SEQ ID NO: 1596 - protein, 120 aa, synthetic construct; identical to SEQ ID NO: 1537

SEQ ID NO: 1597 - protein, 121 aa, synthetic construct; identical to SEQ ID NO: 1533

SEQ ID NO: 1598 - protein, 128 aa, synthetic construct
EVQLLESGGGLVQPGGSLRLSCAASGFTFSNYAMSWVRQAPGKGLEWVSAITGSGSTTYYADSVKGRFTISRDNSKNTLYLQMNSLRAEDTAVYYCTSSDPTYYYDSNGKSSLGMDVWGQGTLVTVSS

SEQ ID NO: 1599 - protein, 120 aa, synthetic construct; identical to SEQ ID NO: 1542

SEQ ID NO: 1600 - protein, 121 aa, synthetic construct; identical to SEQ ID NO: 1533

SEQ ID NO: 1601 - protein, 121 aa, synthetic construct
EVQLLESGGGLVQPGGSLRLSCAASGFTFSNYAMSWVRQAPGKGLEWVSAITGSGSTTYYADSVKGRFTISRDNSKNTLYLQMNSLRAEDTAVYYCATDYGDYDRLNFDLWGQGTLVTVSS

SEQ ID NO: 1602 - protein, 121 aa, synthetic construct
EVQLLESGGGLVQPGGSLRLSCAASGFSFRSYAMSWVRQAPGKGLEWVSIISGSGGSTSYADSVKGRFTISRDNSKNTLYLQMNSLRAEDTAVYYCTRGGLQDQIGHFQHWGQGTLVTVSS

SEQ ID NO: 1603 - protein, 121 aa, synthetic construct
EVQLLESGGGLVQPGGSLRLSCAASGFTFSNYAMSWVRQAPGKGLEWVSAISGSGHSTYYADSVKGRFTISRDNSKNTLYLQMNSLRAEDTAVYYCARGGGYYNPLLFDYWGQGTLVTVSS

SEQ ID NO: 1604 - protein, 120 aa, synthetic construct
EVQLLESGGGLVQPGGSLRLSCAASGFTFSKYAMNWVRQAPGKGLEWVSAISGSGESTYYADSVKGRFTISRDNSKNTLYLQMNSLRAEDTAVYYCARHGGYYYYYMDVWGQGTLVTVSS

SEQ ID NO: 1605 - protein, 122 aa, synthetic construct; identical to SEQ ID NO: 1547

SEQ ID NO: 1606 - protein, 120 aa, synthetic construct; identical to SEQ ID NO: 1526

SEQ ID NO: 1607 - protein, 116 aa, synthetic construct
EVQLLESGGGLVQPGGSLRLSCAASGFGFSSYAMSWVRQAPGKGLEWVSAISGGGGSIYYADSVKGRFTISRDNSKNTLYLQMNSLRAEDTAVYYCAKPDVLFDYWGQGTLVTVSS

SEQ ID NO: 1608 - protein, 121 aa, synthetic construct
EVQLLESGGGLVQPGGSLRLSCAASGFTFSKYAMNWVRQAPGKGLEWVSAISGSGESTYYADSVKGRFTISRDNSKNTLYLQMNSLRAEDTAVYYCATDYGDYDRLNFDLWGQGTLVTVSS

SEQ ID NO: 1609 - protein, 121 aa, synthetic construct; identical to SEQ ID NO: 1532

SEQ ID NO: 1610 - protein, 119 aa, synthetic construct
EVQLLESGGGLVQPGGSLRLSCAASGFTFSTSAMSWVRQAPGKGLEWVSGISGSGGYTYYADSVKGRFTISRDNSKNTLYLQMNSLRAEDTAVYYCASTDDHYYGMDVWGQGTLVTVSS

SEQ ID NO: 1611 - protein, 119 aa, synthetic construct
EVQLLESGGGLVQPGGSLRLSCAASGFTFSNYAMSWVRQAPGKGLEWVSAITGSGSTTYYADSVKGRFTISRDNSKNTLYLQMNSLRAEDTAVYYCAKGGGYYYNMDVWGQGTLVTVSS

SEQ ID NO: 1612 - protein, 120 aa, synthetic construct; identical to SEQ ID NO: 1539

SEQ ID NO: 1613 - protein, 120 aa, synthetic construct
EVQLLESGGGLVQPGGSLRLSCAASGFTFSNYAMSWVRQAPGKGLEWVSAISGSGESTYYADSVKGRFTISRDNSKNTLYLQMNSLRAEDTAVYYCARAHDYDSMLMDYWGQGTLVTVSS

SEQ ID NO: 1614 - protein, 119 aa, synthetic construct
EVQLLESGGGLVQPGGSLRLSCAASGFTFSNYAMSWVRQAPGKGLEWVSAITGSGSTTYYADSVKGRFTISRDNSKNTLYLQMNSLRAEDTAVYYCASSPPFYYYMDVWGQGTLVTVSS

SEQ ID NO: 1615 - protein, 128 aa, synthetic construct; identical to SEQ ID NO: 1588

SEQ ID NO: 1616 - protein, 121 aa, synthetic construct; identical to SEQ ID NO: 1532

SEQ ID NO: 1617 - protein, 120 aa, synthetic construct
EVQLLESGGGLVQPGGSLRLSCAASGFTFSSYAMSWVRQAPGKGLEWVSAISGSGGSTYYADSVKGRFTISRDNSKNTLYLQMNSLRAEDTAVYYCARHQNYYYYGMDVWGQGTLVTVSS

SEQ ID NO: 1618 - protein, 121 aa, synthetic construct
EVQLLESGGGLVQPGGSLRLSCAASGFGFSSYAMSWVRQAPGKGLEWVSAISGGGGSIYYADSVKGRFTISRDNSKNTLYLQMNSLRAEDTAVYYCTRGGLQDQIGHFQHWGQGTLVTVSS

SEQ ID NO: 1619 - protein, 119 aa, synthetic construct; identical to SEQ ID NO: 1544

SEQ ID NO: 1620 - protein, 119 aa, synthetic construct; identical to SEQ ID NO: 1540

SEQ ID NO: 1621 - protein, 120 aa, synthetic construct
EVQLLESGGGLVQPGGSLRLSCAASGFGFSSYAMSWVRQAPGKGLEWVSAISGGGGSIYYADSVKGRFTISRDNSKNTLYLQMNSLRAEDTAVYYCARHGGYYYYYMDVWGQGTLVTVSS

SEQ ID NO: 1622 - protein, 120 aa, synthetic construct; identical to SEQ ID NO: 1542

SEQ ID NO: 1623 - protein, 121 aa, synthetic construct; identical to SEQ ID NO: 1532

SEQ ID NO: 1624 - protein, 122 aa, synthetic construct; identical to SEQ ID NO: 1541

SEQ ID NO: 1625 - protein, 121 aa, synthetic construct; identical to SEQ ID NO: 1527

SEQ ID NO: 1626 - protein, 126 aa, synthetic construct
EVQLLESGGGLVQPGGSLRLSCAASGFAFSSYAMNWVRQAPGKGLEWVSGISGSGGITYYADSVKGRFTISRDNSKNTLYLQMNSLRAEDTAVYYCARGSAAAAGRAYYYYGMDVWGQGTLVTVSS

SEQ ID NO: 1627 - protein, 121 aa, synthetic construct
EVQLLESGGGLVQPGGSLRLSCAASGFGFSSYAMSWVRQAPGKGLEWVSAISGGGGSIYYADSVKGRFTISRDNSKNTLYLQMNSLRAEDTAVYYCAKDATSRWYGEIDYWGQGTLVTVSS

SEQ ID NO: 1628 - protein, 116 aa, synthetic construct
EVQLLESGGGLVQPGGSLRLSCAASGFTFSKYAMNWVRQAPGKGLEWVSAISGSGESTYYADSVKGRFTISRDNSKNTLYLQMNSLRAEDTAVYYCARDQGDMDVWGQGTLVTVSS

SEQ ID NO: 1629 - protein, 107 aa, synthetic construct
DIQMTQSPSSLSASVGDRVTITCRTSQSLSSYLHWYQQKPGKAPKLLIYGQHNRPSGVPSRFSGSGSGTDFTLTISSLQPEDFATYYCQQSYRAPQTFGQGTKVEIK

SEQ ID NO: 1630 - protein, 107 aa, synthetic construct
DIQMTQSPSSLSASVGDRVTITCRASQTIGTYLNWYQQKPGKAPKLLIYSASSLQSGVPSRFSGSGSGTDFTLTISSLQPEDFATYYCQQTDGNPPTFGQGTKVEIK

SEQ ID NO: 1631 - protein, 108 aa, synthetic construct
EIVLTQSPGTLSLSPGERATLSCRASQNVNTRYLAWYQQKPGQAPRLLIYAASSRATGIPDRFSGSGSGTDFTLTISSLEPEDFAVYYCQQYESSPYNFGQGTKVEIK

SEQ ID NO: 1632 - protein, 108 aa, synthetic construct
EIVLTQSPGTLSLSPGERATLSCRASQRITSSYLAWYQQKPGQAPRLLIYGTSSRATGIPDRFSGSGSGTDFTLTISSLEPEDFAVYYCQQYGLSLLTFGQGTKVEIK

SEQ ID NO: 1633 - protein, 110 aa, synthetic construct
DIQMTQSPSSLSASVGDRVTITCKSSQSLLYSNGKTLSWYQQKPGKAPKLLIYETSKLASGVPSRFSGSGSGTDFTLTISSLQPEDFATYYCKQSYTLRTFGQGTKVEIK

SEQ ID NO: 1634 - protein, 107 aa, synthetic construct
DIQMTQSPSSLSASVGDRVTITCRASQSIRRYLNWYQQKPGKAPKLLIYANTNGPSGVPSRFSGSGSGTDFTLTISSLQPEDFATYYCQPSFVFPYTFGQGTKVEIK

SEQ ID NO: 1635 - protein, 107 aa, synthetic construct
DIQMTQSPSSLSASVGDRVTITCRASQDIKNYLNWYQQKPGKAPKLLIYGKKNRPSGVPSRFSGSGSGTDFTLTISSLQPEDFATYYCSQGTHVPPTFGQGTKVEIK

SEQ ID NO: 1636 - protein, 106 aa, synthetic construct
DIQMTQSPSSLSASVGDRVTITCSGDKGHTYTSWYQQKPGKAPKLLIYHTSRLQDGVPSRFSGSGSGTDFTLTISSLQPEDFATYYCQQYDAYPPTFGQGTKVEIK

SEQ ID NO: 1637 - protein, 110 aa, synthetic construct
DIQMTQSPSSLSASVGDRVTITCSGHNLGDKFASWYQQKPGKAPKLLIYRKSNRPSGVPSRFSGSGSGTDFTLTISSLQPEDFATYYCSARSVRGNPHVLFGQGTKVEIK

SEQ ID NO: 1638 - protein, 113 aa, synthetic construct
DIQMTQSPSSLSASVGDRVTITCTSSQSLFNVRSQKNYLAWYQQKPGKAPKLLIYGASSRATGVPSRFSGSGSGTDFTLTISSLQPEDFATYYCAQTGTHPTTFGQGTKVEIK

SEQ ID NO: 1639 - protein, 107 aa, synthetic construct
DIQMTQSPSSLSASVGDRVTITCRASQSIRRYLNWYQQKPGKAPKLLIYTASNLQNGVPSRFSGSGSGTDFTLTISSLQPEDFATYYCQQSYSSAPTFGQGTKVEIK

SEQ ID NO: 1640 - protein, 110 aa, synthetic construct
DIQMTQSPSSLSASVGDRVTITCQASQSISSYLAWYQQKPGKAPKLLIYPKHNRPPGVPSRFSGSGSGTDFTLTISSLQPEDFATYYCVSRSAKGNPHVLFGQGTKVEIK

SEQ ID NO: 1641 - protein, 107 aa, synthetic construct
DIQMTQSPSSLSASVGDRVTITCSASSVSSSYLHWYQQKPGKAPKLLIYEDTKRPSGVPSRFSGSGSGTDFTLTISSLQPEDFATYYCQQSYTTPTTFGQGTKVEIK

SEQ ID NO: 1642 - protein, 106 aa, synthetic construct
DIQMTQSPSSLSASVGDRVTITCRASQSISNNLNWYQQKPGKAPKLLIYGKNIRPSGVPSRFSGSGSGTDFTLTISSLQPEDFATYYCQQRSSPWTFGQGTKVEIK

SEQ ID NO: 1643 - protein, 107 aa, synthetic construct
DIQMTQSPSSLSASVGDRVTITCRASENIYSNLAWYQQKPGKAPKLLIYGRNKRPSGVPSRFSGSGSGTDFTLTISSLQPEDFATYYCSQGTHVPPTFGQGTKVEIK

SEQ ID NO: 1644 - protein, 107 aa, synthetic construct
DIQMTQSPSSLSASVGDRVTITCRASQSIRRYLNWYQQKPGKAPKLLIYHTSRLQDGVPSRFSGSGSGTDFTLTISSLQPEDFATYYCSQSTRVPYTFGQGTKVEIK

SEQ ID NO: 1645 - protein, 116 aa, synthetic construct
DIQMTQSPSSLSASVGDRVTITCTSSQSLFNVRSQKNYLAWYQQKPGKAPKLLIYDASNLQSGVPSRFSGSGSGTDFTLTISSLQPEDFATYYCSSRSRHGNPHVLFGQGTKVEIK

SEQ ID NO: 1646 - protein, 107 aa, synthetic construct
DIQMTQSPSSLSASVGDRVTITCQGASLRNYYASWYQQKPGKAPKLLIYGTSYRYSGVPSRFSGSGSGTDFTLTISSLQPEDFATYYCQAWDNGAAVFGQGTKVEIK

SEQ ID NO: 1647 - protein, 106 aa, synthetic construct
DIQMTQSPSSLSASVGDRVTITCSASSSVTYMHWYQQKPGKAPKLLIYAASKLASGVPSRFSGSGSGTDFTLTISSLQPEDFATYYCQQGDALPPTFGQGTKVEIK

SEQ ID NO: 1648 - protein, 110 aa, synthetic construct
DIQMTQSPSSLSASVGDRVTITCSGNKLGDKYASWYQQKPGKAPKLLIYQMSHLASGVPSRFSGSGSGTDFTLTISSLQPEDFATYYCASRSSKGNPHVLFGQGTKVEIK

SEQ ID NO: 1649 - protein, 112 aa, synthetic construct
DIQMTQSPSSLSASVGDRVTITCRASQNIYQNLDWYQQKPGKAPKLLIYGASNLHSGVPSRFSGSGSGTDFTLTISSLQPEDFATYYCQTNYGTSSSNYGFAFGQGTKVEIK

SEQ ID NO: 1650 - protein, 106 aa, synthetic construct
DIQMTQSPSSLSASVGDRVTITCRASHNINSYLNWYQQKPGKAPKLLIYGASRLQRGVPSRFSGSGSGTDFTLTISSLQPEDFATYYCQQSYSTPTFGQGTKVEIK

SEQ ID NO: 1651 - protein, 106 aa, synthetic construct
DIQMTQSPSSLSASVGDRVTITCRASQSIRRYLNWYQQKPGKAPKLLIYGNNNRPSGVPSRFSGSGSGTDFTLTISSLQPEDFATYYCQAWATNVVFGQGTKVEIK

SEQ ID NO: 1652 - protein, 107 aa, synthetic construct
DIQMTQSPSSLSASVGDRVTITCRASQSIRRYLNWYQQKPGKAPKLLIYHTSRLQSGVPSRFSGSGSGTDFTLTISSLQPEDFATYYCSQSTHVPLTFGQGTKVEIK

SEQ ID NO: 1653 - protein, 107 aa, synthetic construct
DIQMTQSPSSLSASVGDRVTITCSGDKLGHTYTSWYQQKPGKAPKLLIYATSNLASGVPSRFSGSGSGTDFTLTISSLQPEDFATYYCRQGAASPRTFGQGTKVEIK

SEQ ID NO: 1654 - protein, 109 aa, synthetic construct
DIQMTQSPSSLSASVGDRVTITCSASQDINKYLNWYQQKPGKAPKLLIYRKSNRPSGVPSRFSGSGSGTDFTLTISSLQPEDFATYYCNSFSPKPKPVVFGQGTKVEIK

SEQ ID NO: 1655 - protein, 110 aa, synthetic construct
DIQMTQSPSSLSASVGDRVTITCSGDKLGDKYAYWYQQKPGKAPKILIYGASSRATGVPSRFSGSGSGTDFTLTISSLQPEDFATYYCASRSSKGNPHVLFGQGTKVEIK

SEQ ID NO: 1656 - protein, 107 aa, synthetic construct
DIQMTQSPSSLSASVGDRVTITCRASHNINSYLNWYQQKPGKAPKLLIYGNNNRPSGVPSRFSGSGSGTDFTLTISSLQPEDFATYYCQQSYSNPLTFGQGTKVEIK

SEQ ID NO: 1657 - protein, 106 aa, synthetic construct
DIQMTQSPSSLSASVGDRVTITCSGDLRNKYASWYQQKPGKAPKLLIYGASSRATGVPSRFSGSGSGTDFTLTISSLQPEDFATYYCQQGPGTPNTFGQGTKVEIK

SEQ ID NO: 1658 - protein, 109 aa, synthetic construct
DIQMTQSPSSLSASVGDRVTITCSGDNLGDKYVHWYQQKPGKAPKLLIYATSTLQSGVPSRFSGSGSGTDFTLTISSLQPEDFATYYCGATDLSPWSIVFGQGTKVEIK

SEQ ID NO: 1659 - protein, 110 aa, synthetic construct
DIQMTQSPSSLSASVGDRVTITCRASHNINSYLNWYQQKPGKAPKLLIYGKKNRPSGVPSRFSGSGSGTDFTLTISSLQPEDFATYYCATRAVRGNPHVLFGQGTKVEIK

SEQ ID NO: 1660 - protein, 107 aa, synthetic construct
DIQMTQSPSSLSASVGDRVTITCRASQYIGTALNWYQQKPGKAPKLLIYAASTLQRGVPSRFSGSGSGTDFTLTISSLQPEDFATYYCQQRSSFPLTFGQGTKVEIK

SEQ ID NO: 1661 - protein, 107 aa, synthetic construct
DIQMTQSPSSLSASVGDRVTITCRASQTIERRLNWYQQKPGKAPKLLIYGNNNRPSGVPSRFSGSGSGTDFTLTISSLQPEDFATYYCQQTATWPFTFGQGTKVEIK

SEQ ID NO: 1662 - protein, 110 aa, synthetic construct; identical to SEQ ID NO: 1633

SEQ ID NO: 1663 - protein, 106 aa, synthetic construct; identical to SEQ ID NO: 1636

SEQ ID NO: 1664 - protein, 107 aa, synthetic construct
DIQMTQSPSSLSASVGDRVTITCKASENVDTYVSWYQQKPGKAPKLLIYGQHNRPSGVPSRFSGSGSGTDFTLTISSLQPEDFATYYCQQSYSTPRTFGQGTKVEIK

SEQ ID NO: 1665 - protein, 107 aa, synthetic construct
DIQMTQSPSSLSASVGDRVTITCRASQSIVTYLNWYQQKPGKAPKLLIYGTTSLESGVPSRFSGSGSGTDFTLTISSLQPEDFATYYCSQSTRVPPTFGQGTKVEIK

SEQ ID NO: 1666 - protein, 110 aa, synthetic construct
DIQMTQSPSSLSASVGDRVTITCRASQSISNNLNWYQQKPGKAPKLLIYRKSNRPSGVPSRFSGSGSGTDFTLTISSLQPEDFATYYCSSRDKSGSRLVTFGQGTKVEIK

SEQ ID NO: 1667 - protein, 107 aa, synthetic construct
DIQMTQSPSSLSASVGDRVTITCRASQDVSSGVAWYQQKPGKAPKLLIYDTSKVASGVPSRFSGSGSGTDFTLTISSLQPEDFETYYCQQSKEVPWTFGQGTKVEIK

SEQ ID NO: 1668 - protein, 110 aa, synthetic construct
DIQMTQSPSSLSASVGDRVTITCSGDNLGDKYVHWYQQKPGKAPKLLIYENNNRPSGVPSRFSGSGSGTDFTLTISSLQPEDFATYYCVARSVVGNPHVLFGQGTKVEIK

SEQ ID NO: 1669 - protein, 113 aa, synthetic construct
DIQMTQSPSSLSASVGDRVTITCTSSQSLFNVRSQKNYLAWYQQKPGKAPKLLIYDASNLQSGVPSRFSGSGSGTDFTLTISSLQPEDFATYYCQQGHTLPWTFGQGTKVEIK

SEQ ID NO: 1670 - protein, 112 aa, synthetic construct
DIQMTQSPSSLSASVGDRVTITCKSSQSLLYSNGKTFLSWYQQKPGKAPKLLIYQNDKRPSGVPSRFSGSGSGTDFTLTISSLQPEDFATYYCQQSTGHPQTFGQGTKVEIK

SEQ ID NO: 1671 - protein, 107 aa, synthetic construct
DIQMTQSPSSLSASVGDRVTITCSGDKLGHTYTSWYQQKPGKAPKLLIYQNDKRPSGVPSRFSGSGSGTDFTLTISSLQPEDFATYYCQSYDKSNVVFGQGTKVEIK

SEQ ID NO: 1672 - protein, 107 aa, synthetic construct
DIQMTQSPSSLSASVGDRVTITCRASQNIRSYLNWYQQKPGKAPKLLIYQNDKRPSGVPSRFSGSGSGTDFTLTISSLQPEDFATYYCQQGHTLPWTFGQGTKVEIK

SEQ ID NO: 1673 - protein, 109 aa, synthetic construct
DIQMTQSPSSLSASVGDRVTITCRASQGVRTSLAWYQQKPGKAPKLMIYGASNLHSGVPSRFSGSGSGTDFTLTISSLQPEDFATYYCSSRDRSGNHRVFGQGTKVEIK

SEQ ID NO: 1674 - protein, 107 aa, synthetic construct
DIQMTQSPSSLSASVGDRVTITCRASQSIRRYLNWYQQKPGKAPKLLIYEDTKRPSGVPSRFSGSGSGTDFTLTISSLQPEDFATYYCQQSYSNPLTFGQGTKVEIK

SEQ ID NO: 1675 - protein, 107 aa, synthetic construct
DIQMTQSPSSLSASVGDRVTITCRASQSVDRYFNWYQQKPGKAPKLLIYGASTLQSGVPSRFSGSGSGTDFTLTISSLQPEDFATYYCFQGSHIPYTFGQGTKVEIK

SEQ ID NO: 1676 - protein, 110 aa, synthetic construct
DIQMTQSPSSLSASVGDRVTITCRASQSVDRYFNWYQQKPGKAPKLLIYGNNNRPSGVPSRFSGSGSGTDFTLTISSLQPEDFATYYCATRAVRGNPHVLFGQGTKVEIK

SEQ ID NO: 1677 - protein, 106 aa, synthetic construct
DIQMTQSPSSLSASVGDRVTITCSGDLRNKYASWYQQKPGKAPKLLIYDNNIRPSGVPSRFSGSGSGTDFTLTISSLQPEDFATYYCSQGTNVPPTFGQGTKVEIK

SEQ ID NO: 1678 - protein, 106 aa, synthetic construct
DIQMTQSPSSLSASVGDRVTITCRASQNIRSYLNWYQQKPGKAPKLLIYGKNIRPSGVPSRFSGSGSGTDFTLTISSLQPEDFATYYCQQGRRLWSFGQGTKVEIK

SEQ ID NO: 1679 - protein, 110 aa, synthetic construct
DIQMTQSPSSLSASVGDRVTITCRASQSIRRYLNWYQQKPGKAPKLLIYGNNNRPSGVPSRFSGSGSGTDFTLTISSLQPEDFATYYCSTRSSKGNPHVLFGQGTKVEIK

SEQ ID NO: 1680 - protein, 107 aa, synthetic construct
DIQMTQSPSSLSASVGDRVTITCSGDTLGGKYAWWYQQKPGKAPKLLIYATSNLASGVPSRFSGSGSGTDFTLTISSLQPEDFATYYCQQNLAPPYTFGQGTKVEIK

SEQ ID NO: 1681 - protein, 107 aa, synthetic construct
DIQMTQSPSSLSASVGDRVTITCRASQSSRRYLNWYQQKPGKAPKLLIYHTSRLHSGVPSRFSGSGSGTDFTLTISSLQPEDFATYYCSQGTHVPPTFGQGTKVEIK

SEQ ID NO: 1682 - protein, 106 aa, synthetic construct
DIQMTQSPSSLSASVGDRVTITCRASQTIERRLNWYQQKPGKAPKLLIYDNIRPSGVPSRFSGSGSGTDFTLTISSLQPEDFATYYCQQYEKLPWTFGQGTKVEIK

SEQ ID NO: 1683 - protein, 110 aa, synthetic construct
DIQMTQSPSSLSASVGDRVTITCSGDALGSKFAHWYQQKPGKAPKLLIYGQHNRPSGVPSRFSGSGSGTDFTLTISSLQPEDFATYYCSTRSRKGNPHVLFGQGTKVEIK

SEQ ID NO: 1684 - protein, 106 aa, synthetic construct
DIQMTQSPSSLSASVGDRVTITCSASSSVSYMYWYQQKPGKAPKLLIYGRNKRPSGVPSRFSGSGSGTDFTLTISSLQPEDFATYYCQTWGPGIRVFGQGTKVEIK

SEQ ID NO: 1685 - protein, 110 aa, synthetic construct; identical to SEQ ID NO: 1633

SEQ ID NO: 1686 - protein, 107 aa, synthetic construct
DIQMTQSPSSLSASVGDRVTITCRASQTIGDYLNWYQQKPGKAPKLLIYGRNKRPSGVPSRFSGSGSGTDFTLTISSLQPEDFATYYCQQGFSNPWTFGQGTKVEIK

SEQ ID NO: 1687 - protein, 110 aa, synthetic construct
DIQMTQSPSSLSASVGDRVTITCRASQSISNNLNWYRQKPGKAPKLLIYRASQLQSGVPSRFSGSGSGTDFTLTISSLQPEDFATYYCSTRSSKGNPHVLFGQGTKVEIK

SEQ ID NO: 1688 - protein, 107 aa, synthetic construct
DIQMTQSPSSLSASVGDRVTITCQASQSISSYLAWYQQKPGKAPKLLIYGRNKRPSGVPSRFSGSGSGTDFTLTISSLQPEDFATYYCAQGLRKPKTFGQGTKVEIK

SEQ ID NO: 1689 - protein, 111 aa, synthetic construct
DIQMTQSPSSLSASVGDRVTITCKSSQSLLYSNGKTLSWYQQKPGKAPKLLIYETSKLASGVPSRFSGSGSGTDFTLTISSLQPEDFATYYCQQGFSNPWTFGQGTKVEIK

SEQ ID NO: 1690 - protein, 107 aa, synthetic construct
DIQMTQSPSSLSASVGDRVTITCRASQSISNNLNWYQQKPGKAPKLLIYHDNKRPSGVPSRFSGSGSGTDFTLTISSLQPEDFATYYCQPSFFFPYTFGQGTKVEIK

SEQ ID NO: 1691 - protein, 110 aa, synthetic construct
DIQMTQSPSSLSASVGDRVTITCSGHNLGDKFASWYQQKPGKAPKLLIYAKNNRPSGVPSRFSGSGSGTDFTLTISSLQPEDFATYYCASRSSKGNPHVLFGQGTKVEIK

SEQ ID NO: 1692 - protein, 110 aa, synthetic construct
DIQMTQSPSSLSASVGDRVTITCRPNQNIATYINWYQQKPGKAPKLLIYHDNKRPSGVPSRFSGSGSGTDFTLTISSLQPEDFATYYCMARSRKGNPHVLFGQGTKVEIK

SEQ ID NO: 1693 - protein, 107 aa, synthetic construct
DIQMTQSPSSLSASVGDRVTITCKASQHVITHVTWYQQKPGKAPKLLIYGKNIRPSGVPSRFSGSGSGTDFTLTISSLQPEDFATYYCQQTATWPFTFGQGTKVEIK

SEQ ID NO: 1694 - protein, 107 aa, synthetic construct
DIQMTQSPSSLSASVGDRVTITCRASQSIRRYLNWYQQKPGKAPKLLIYGKKNRPSGVPSRFSGSGSGTDFTLTISSLQPEDFATYYCAQTGTHPTTFGQGTKVEIK

SEQ ID NO: 1695 - protein, 109 aa, synthetic construct
DIQMTQSPSSLSASVGDRVTITCRASQSVDRYFNWYQQKPGKAPKLLIYRASTLASGVPSRFSGSGSGTDFTLTISSLQPEDFATYYCSSRDRSGNHRVFGQGTKVEIK

SEQ ID NO: 1696 - protein, 110 aa, synthetic construct
DIQMTQSPSSLSASVGDRVTITCRASQDVSSGVAWYQQKPGKAPKLLIYEDTKRPSGVPSRFSGSGSGTDFTLTISSLQPEDFATYYCATRAVRGNPHVLFGQGTKVEIK

SEQ ID NO: 1697 - protein, 105 aa, synthetic construct
DIQMTQSPSSLSASVGDRVTITCRTSQSLSSYLHWYQQKPGKAPKLLIYGSLRKGVPSRFSGSGSGTDFTLTISSLQPEDFATYYCSQSTRVPYTFGQGTKVEIK

SEQ ID NO: 1698 - protein, 106 aa, synthetic construct
DIQMTQSPSSLSASVGDRVTITCRASHNINSYLNWYQQKPGKAPKLLIYAASKLASGVPSRFSGSGSGTDFTLTISSLQPEDFATYYCQQDIKHPTFGQGTKVEIK

SEQ ID NO: 1699 - protein, 107 aa, synthetic construct
DIQMTQSPSSLSASVGDRVTITCRASQGVRTSLAWYQQKPGKAPKLLIYDASNLQSGVPSRFSGSGSGTDFTLTISSLQPEDFATYYCQQSYENPLTFGQGTKVEIK

SEQ ID NO: 1700 - protein, 107 aa, synthetic construct
DIQMTQSPSSLSASVGDRVTITCKASENVDTYVSWYQQKPGKAPKLLIYQDNKWPSGVPSRFSGSGSGTDFTLTISSLQPEDFATYYCQQSYYSPYTFGQGTKVEIK

SEQ ID NO: 1701 - protein, 106 aa, synthetic construct
DIQMTQSPSSLSASVGDRVTITCSASSSVTYMHWYQQKPGKAPKLLIYQNDKRPSGVPSRFSGSGSGTDFTLTISSLQPEDFATYYCGQSYRYPLTFGQGTKVEIK

SEQ ID NO: 1702 - protein, 109 aa, synthetic construct
DIQMTQSPSSLSASVGDRVTITCSGDLGEKYVSWYQQKPGKAPKLLIYGKKNRPSGVPSRFSGSGSGTDFTLTISSLQPEDFATYYCMSRSIWGNPHVLFGQGTKVEIK

SEQ ID NO: 1703 - protein, 107 aa, synthetic construct
DIQMTQSPSSLSASVGDRVTITCRANQNIGNFLNWYQQKPGKAPKLLIYGKKNRPSGVPSRFSGSGSGTDFTLTISSLQPEDFATYYCQQSYSTPRTFGQGTKVEIK

SEQ ID NO: 1704 - protein, 109 aa, synthetic construct
DIQMTQSPSSLSASVGDRVTITCSGDLGEKYVSWYQQKPGKAPKLLIYGASRLQRGVPSRFSGSGSGTDFTLTISSLQPEDFATYYCASRSSKGNPHVLFGQGTKVEIK

SEQ ID NO: 1705 - protein, 107 aa, synthetic construct; identical to SEQ ID NO: 1634

SEQ ID NO: 1706 - protein, 109 aa, synthetic construct
DIQMTQSPSSLSASVGDRVTITCRASHNINSYLNWYQQKPGKAPKLLIYRKSNRPSGVPSRFSGSGSGTDFTLTISSLQPEDFATYYCSSWAGSRSGTVFGQGTKVEIK

SEQ ID NO: 1707 - protein, 107 aa, synthetic construct
DIQMTQSPSSLSASVGDRVTITCRASQSIRRYLNWYQQKPGKAPKLLIYQASSLQSGVPSRFSGSGSGTDFTLTISSLQPEDFATYYCQQSLRTPFTFGQGTKVEIK

SEQ ID NO: 1708 - protein, 109 aa, synthetic construct
DIQMTQSPSSLSASVGDRVTITCRATQSIRSFLNWYQQKPGKAPKLLIYENNNRPSGVPSRFSGSGSGTDFTLTISSLQPEDFATYYCSSWAGSRSGTVFGQGTKVEIK

SEQ ID NO: 1709 - protein, 107 aa, synthetic construct
DIQMTQSPSSLSASVGDRVTITCRASQSISSYVNWYQQKPGKAPKLLIYGASNLHSGVPSRFSGSGSGTDFTLTISSLQPEDFATYYCSQSTHVPPTFGQGTKVEIK

SEQ ID NO: 1710 - protein, 109 aa, synthetic construct
DIQMTQSPSSLSASVGDRVTITCRASQSISSYVNWYQQKPGKAPKLLIYDASSSQSGVPSRFSGSGSGTDFTLTISSLQPEDFATYYCNSRDTSGNHLVFGQGTKVEIK

SEQ ID NO: 1711 - protein, 108 aa, synthetic construct
DIQMTQSPSSLSASVGDRVTITCSGDLRNKYASWYQQKPGKAPKLLIYGASSRATGVPSRFSGSGSGTDFTLTISSLQPEDFATYYCSSRDRSGNHRVFGQGTKVEIK

SEQ ID NO: 1712 - protein, 107 aa, synthetic construct
DIQMTQSPSSLSASVGDRVTITCRASQSVRSYLNWYQQKPGKAPKLLIYRASQLQSGVPSRFSGSGSGTDFTLTISSLQPEDFATYYCFQGSHAPLTFGQGTKVEIK

SEQ ID NO: 1713 - protein, 106 aa, synthetic construct
DIQMTQSPSSLSASVGDRVTITCRASSSVSYMHWYQQKPGKAPKLLIYRASQLQSGVPSRFSGSGSGTDFTLTISSLQPEDFATYYCQQGYTLPWTFGQGTKVEIK

SEQ ID NO: 1714 - protein, 107 aa, synthetic construct
DIQMTQSPSSLSASVGDRVTITCQASQSISSYLAWYQQKPGKAPKLLIYENNNRPSGVPSRFSGSGSGTDFTLTISSLQPEDFATYYCSQGTHVPPTFGQGTKVEIK

SEQ ID NO: 1715 - protein, 107 aa, synthetic construct
DIQMTQSPSSLSASVGDRVTITCQGGSPRSYYASWYQQKPGKAPKLLIYATSTLQSGVPSRFSGSGSGTDFTLTISSLQPEDFATYYCQQHYTTPPVFGQGTKVEIK

SEQ ID NO: 1716 - protein, 107 aa, synthetic construct
DIQMTQSPSSLSASVGDRVTITCTGDKLAEKYVSWYQQKPGKAPKLLIYGKNIRPSGVPSRFSGSGSGTDFTLTISSLQPEDFATYYCAQGLRKPKTFGQGTKVEIK

SEQ ID NO: 1717 - protein, 107 aa, synthetic construct
DIQMTQSPSSLSASVGDRVTITCRASHNINSYLNWYQQKPGKAPKLLIYPKHNRPPGVPSRFSGSGSGTDFTLTISSLQPEDFATYYCQQWSSNPWTFGQGTKVEIK

SEQ ID NO: 1718 - protein, 109 aa, synthetic construct
DIQMTQSPSSLSASVGDRVTITCRASQGVRTSLAWYQQKPGKAPKLLIYGNNNRPSGVPSRFSGSGSGTDFTLTISSLQPEDFATYYCGATDLSPWSIVFGQGTKVEIK

SEQ ID NO: 1719 - protein, 107 aa, synthetic construct
DIQMTQSPSSLSASVGDRVTITCRASQTIERRLNWYQQKPGKAPKLLIYNAKTLPEGVPSRFSGSGSGTDFTLTISSLQPEDFATYYCSQSTRVPYTFGQGTKVEIK

SEQ ID NO: 1720 - protein, 107 aa, synthetic construct
DIQMTQSPSSLSASVGDRVTITCSGDKLGHTYTSWYQQKPGKAPKLLIYKVSNRFSGVPSRFSGSGSGTDFTLTISSLQPEDFATYYCAQTGTHPTTFGQGTKVEIK

SEQ ID NO: 1721 - protein, 112 aa, synthetic construct
DIQMTQSPSSLSASVGDRVTITCKASENVDTYVSWYQQKPGKAPKLLIYTASTLQSGVPSRFSGSGSGTDFTLTISSLQPEDFATYYCQHWHGHPHHGEHNVFGQGTKVEIK

SEQ ID NO: 1722 - protein, 107 aa, synthetic construct
DIQMTQSPSSLSASVGDRVTITCRASQTIGDYLNWYQQKPGKAPKLLIYHDNKRPSGVPSRFSGSGSGTDFTLTISSLQPEDFATYYCQQGYRFPLTFGQGTKVEIK

SEQ ID NO: 1723 - protein, 109 aa, synthetic construct
DIQMTQSPSSLSASVGDRVTITCSASQDINKYLNWYQQKPGKAPKLLIYGNNNRPSGVPSRFSGSGSGTDFTLTISSLQPEDFATYYCGSYTLTNTASVFGQGTKVEIK

SEQ ID NO: 1724 - protein, 109 aa, synthetic construct
DIQMTQSPSSLSASVGDRVTITCRASQRISSFLNWYQQKPGKAPKLLIYKKRPSGVPSRFSGSGSGTDFTLTISSLQPEDFATYYCQGSYYSGSGWYYAFGQGTKVEIK

SEQ ID NO: 1725 - protein, 107 aa, synthetic construct
DIQMTQSPSSLSASVGDRVTITCRASQTISNYVNWYQQKPGKAPKLMIYAASRLQSGVPSRFSGSGSGTDFTLTISSLQPEDFATYYCQQTHSTPRTFGGGTKVEIK

SEQ ID NO: 1726 - protein, 107 aa, synthetic construct
DIQMTQSPSSLSASVGDRVTITCRASQSIATYLHWYQQKPGKAPKLLIYAASRLQRGVPSRFSGSGSGTDFTLTISSLQPEDFATYYCQQSHSAPYTFGGGTKVEIK

SEQ ID NO: 1727 - protein, 107 aa, synthetic construct
DIQMTQSPSSLSASVGDRVTITCRASRSIGTYLNWYQQKPGKAPKLLIYAASTLRSGVPSRFSGSGSGTDFTLTISSLQPEDFATYYCQQNYNTPYTFGGGTKVEIK

SEQ ID NO: 1728 - protein, 108 aa, synthetic construct
DIQMTQSPSSLSASVGDRVTITCRASQSIRTYLNWYQQKPGKAPKLLIYGASRLQGGVPSRFSGSGSGTDFTLTISSLQPEDFATYYCQQTLPRTLWTFGGGTKVEIK

SEQ ID NO: 1729 - protein, 107 aa, synthetic construct
DIQMTQSPSSLSASVGDRVTITCRASQNINRYLNWYQQKPGKAPKLLIYATSNLQSGVPSRFSGSGSGTDFTLTISSLQPEDFATYYCRQSYSTPITFGGGTKVEIK

SEQ ID NO: 1730 - protein, 107 aa, synthetic construct
DIQMTQSPSSLSASVGDRVTITCRASQSIRSYLNWYQQKPGKAPKLLIYAASTLASGVPSRFSGSGSGTDFTLTISSLQPEDFATYYCQQTYRIPYTFGGGTKVEIK

SEQ ID NO: 1731 - protein, 107 aa, synthetic construct
DIQMTQSPSSLSASVGDRVTITCRASQSVSRYLNWYQQKPGKAPKLLIYGASTLQSGVPSRFSGSGSGTDFTLTISSLQPEDFATYYCQQGYSTPRTFGGGTKVEIK

SEQ ID NO: 1732 - protein, 103 aa, synthetic construct
DIQMTQSPSSLSASVGDRVTITCRSSQSISNYLNWYQQKPGKAPKLLSTLQRGVPSRFSGSGSGTDFTLTISSLQPEDFATYYCQQGYSTPRTFGGGTKVEIK

SEQ ID NO: 1733 - protein, 107 aa, synthetic construct
DIQMTQSPSSLSASVGDRVTITCRASQSVITYLNWYQQKPGKAPKLLIYAASTLHSGVPSRFSGSGSGTDFTLTISSLQPEDFATYYCQQSYATPFTFGGGTKVEIK

SEQ ID NO: 1734 - protein, 107 aa, synthetic construct
DIQMTQSPSSLSASVGDRVTITCRASQNINKYLNWYQQKPGKAPKLLIYGAASLQSGVPSRFSGSGSGTDFTLTISSLQPEDFATYYCQQTYSPPFTFGGGTKVEIK

SEQ ID NO: 1735 - protein, 107 aa, synthetic construct
DIQMTQSPSSLSASVGGRVTITCRASQGIATYLNWYQQKPGKAPKLLIYAASRLRSGVPSRFSGSGSGTDFTLTISSLQPEDFATYYCQQSYRTPPTFGGGTKVEIK

SEQ ID NO: 1736 - protein, 107 aa, synthetic construct
DIQMTQSPSSLSASVGDRVTITCRTSQSISTYLNWYQQKPGKAPKLLIYRASRLQSGVPSRFSGSGSGTDFTLTISSLQPEDFATYYCQQSSSTPYTFGGGTKVEIK

SEQ ID NO: 1737 - protein, 107 aa, synthetic construct
DIQMTQSPSSLSASVGDRVTITCRASQTISNYVNWYQQKPGKAPKLMIYAASRLQSGVPSRFSGSGSGTDFTLTISSLQPEDFATYYCQQSYTSPWTFGGGTKVEIK

SEQ ID NO: 1738 - protein, 107 aa, synthetic construct
DIQMTQSPSSLSASVGDRVTITCRASQTIGRYLNWYQQKPGKAPKLLIYAASYLQSGVPSRFSGSGSGTDFTLTISSLRPEDFATYYCQQNYNTPYTFGGGTKVEIK

SEQ ID NO: 1739 - protein, 107 aa, synthetic construct; identical to SEQ ID NO: 1725

SEQ ID NO: 1740 - protein, 107 aa, synthetic construct; identical to SEQ ID NO: 1725

SEQ ID NO: 1741 - protein, 106 aa, synthetic construct
DIQMTQSPSSLSASVGDRVTITCRASQSISKYLSWYQQKPGKAPKLLIYGATTLQSGVPSRFSGSGSGTDFTLTISSLQPEDFATYYCQQSYSTPRFGGGTKVEIK

SEQ ID NO: 1742 - protein, 107 aa, synthetic construct
DIQMTQSPSSLSASVGDRVTITCRASQSIRRYLNWYQQKPGKAPKLLIYAASRLRSGVPSRFSGSGSGTDFTLTISSLQPEDFATYYCQQTDTSPWTFGGGTKVEIK

SEQ ID NO: 1743 - protein, 107 aa, synthetic construct; identical to SEQ ID NO: 1729

SEQ ID NO: 1744 - protein, 107 aa, synthetic construct; identical to SEQ ID NO: 1725

SEQ ID NO: 1745 - protein, 107 aa, synthetic construct
DIQMTQSPSSLSASVGDRVTITCRASQNIRSYLNWYQQKPGKAPKLLIYHASNLQSGVPSRFSGSGSGTDFTLTISSLQPEDFATYYCQQAYNTPWTFGGGTKVEIK

SEQ ID NO: 1746 - protein, 107 aa, synthetic construct
DIQMTQSPSSLSASVGDRVTITCRASQGISNYLNWYQQKPGKAPKLLIYAASGLQSGVPSRFSGSGSGTDFTLTISSLQPEDFATYYCQQSYTSPWTFGGGTKVEIK

SEQ ID NO: 1747 - protein, 107 aa, synthetic construct; identical to SEQ ID NO: 1725

SEQ ID NO: 1748 - protein, 107 aa, synthetic construct; identical to SEQ ID NO: 1725

SEQ ID NO: 1749 - protein, 107 aa, synthetic construct
DIQMTQSPSSLSASVGDRVTITCRASQTISNYVNWYQQKPGKAPKLMIYAASRLQSGVPSRFSGSESGTDFTLTISSLQPEDFATYYCQQTSSSPLTFGGGTKVEIK

SEQ ID NO: 1750 - protein, 107 aa, synthetic construct
DIQMTQSPSSLSASVGDRVTITCRASQSISRYLNWYQQKPGKAPKLLIYASSTLQTGVPSRFSGSGSGTDFTLTISSLQPEDFATYYCQQTYITPFTFGGGTKVEIK

SEQ ID NO: 1751 - protein, 108 aa, synthetic construct
DIQMTQSPSSLSASVGDRVTITCRASQYIGNYLNWYQQKPGKAPKLLIYRASSLQSGVPSRFSGSGSGTDFTLTISSLQPEDFATYYCQQTLPRTLWTFGGGTKVEIK

SEQ ID NO: 1752 - protein, 107 aa, synthetic construct; identical to SEQ ID NO: 1725

SEQ ID NO: 1753 - protein, 107 aa, synthetic construct
DIQMTQSPSSLSASVGDRVTITCRTSQSISNRLNWYQQKPGKAPKLLIYGASTLQSGVPSRFSGSGSGTDFTLTISSLQPEDFATYYCQQGYSAPFTFGGGTKVEIK

SEQ ID NO: 1754 - protein, 107 aa, synthetic construct
DIQMTQSPSSLSASVGDRVTITCRASQNIGGYLNWYQQKPGKAPKLLIYASSRLQSGVPSRFSGSGSGTDFTLTISSLQPEDSATYYCQQSFTSPLTFGGGTKVEIK

SEQ ID NO: 1755 - protein, 107 aa, synthetic construct
DIQMTQSPSSLYASVGDRVTITCRASQNINKYLNWYQQKPGKAPKLLIYSVSNLQSGVPSRFSGSGSGTDFTLTISSLQPEDFATYYCQQGYSSPLTFGGGTKVEIK

SEQ ID NO: 1756 - protein, 106 aa, synthetic construct
DIQMTQSPSSLSASVGDRVTITCRASQSVSSHLNWYQQKPGKAPKLLIYVTSSLQSGVPSRFSGSGSGTDFTLTISSLQPEDFATYYCQQSHSTPTFGGGTKVEIK

SEQ ID NO: 1757 - protein, 107 aa, synthetic construct
DIQMTQSPSSLSASVGDRVTITCRASQIISRYLNWYQQKPGKAPKLLIYATSNLHSGVPSRFSGSGSGTDFTLTISSLQPEDFATYYCQQSYSGPRTFGGGTKVEIK

SEQ ID NO: 1758 - protein, 107 aa, synthetic construct; identical to SEQ ID NO: 1725

SEQ ID NO: 1759 - protein, 107 aa, synthetic construct; identical to SEQ ID NO: 1725

SEQ ID NO: 1760 - protein, 107 aa, synthetic construct; identical to SEQ ID NO: 1725

SEQ ID NO: 1761 - protein, 107 aa, synthetic construct; identical to SEQ ID NO: 1725

SEQ ID NO: 1762 - protein, 107 aa, synthetic construct
DIQMTQSPSSLSASVGDRVTITCRASQSITKYLNWYQQKPGKAPKLLIYGASRLQSGVPSRFSGSGSGTDFTLTISSLQPEDFATYYCQQSYKTPRTFGGGTKVEIK

SEQ ID NO: 1763 - protein, 106 aa, synthetic construct
DIQMTQSPSSLSASAGDRVTITCRASQGISRHLNWYQQKPGKAPKLLIYGASNLRSGVPSRFSGSGSGTDFTLTISSLQPEDFATYYCQQSYSSYTFGGGTKVEIK

SEQ ID NO: 1764 - protein, 107 aa, synthetic construct
DIQMTQSPSSLSASVGDRVTITCRASQSIRTYLNWYQQKPGKAPKLLIYAASRLRSGVPSRFSGSGSGTDFTLTISSLQPEDFATYYCQQGYSTPRSFGGGTKVEIK

SEQ ID NO: 1765 - protein, 107 aa, synthetic construct
DIQMTQSPSSLSASVGDRVTITCRASQTIITYLNWYQQKPGKAPKLLIYGASSLQTGVPSRFSGSGSGTDFTLTISSLQPEDFATYYCQQSYSLPWTFGGGTKVEIK

SEQ ID NO: 1766 - protein, 107 aa, synthetic construct; identical to SEQ ID NO: 1725

SEQ ID NO: 1767 - protein, 108 aa, synthetic construct
DIQMTQSPSSLSASVGDRVTITCRASQSIRHYLNWYQQKPGKAPKLLIYGASRLQSGVPSRFSGSGSGTDFTLTISSLQPEDFATYYCQQTLPRTLWTFGGGTKVEIK

SEQ ID NO: 1768 - protein, 108 aa, synthetic construct
DIQMTQSPSSLSASVGDRVTITCRASQSISSYLSWYQQKPGKAPKLLIYAASRSQSGVPSRFSGSGSGTDFTLTISSLQPEDFATYYCQQSYSTPQWTFGGGTKVEIK

SEQ ID NO: 1769 - protein, 107 aa, synthetic construct
DIQMTQSPSSLSASVGDHVTITCRASQSISTFVNWYQQKPGKAPKLLIYASSILQSGVPSRFSGSGSGTDFTLTISSLQPEDFATYYCQQSYSAPLTFGGGTKVEIK

SEQ ID NO: 1770 - protein, 107 aa, synthetic construct; identical to SEQ ID NO: 1725

SEQ ID NO: 1771 - protein, 107 aa, synthetic construct
DIQMTQSPSSLSASVGDRVTITCRASRSISRYLNWYQQKPGKAPKLLIYGASSLQSGVPSRFSGSGSGTDFTLTISSLQPEDFATYYCQQTYSTPLTFGGGTKVEIK

SEQ ID NO: 1772 - protein, 107 aa, synthetic construct
DIQMTQSPSSLSASVGDRVTITCRASQTISNYVNWYQQKPGKAPKLMIYAASRLQSGVPSRFSGSGSGTDFTLTISSLQPEDFATYYCQQSYSNPRTFGGGTKVEIK

SEQ ID NO: 1773 - protein, 107 aa, synthetic construct; identical to SEQ ID NO: 1725

SEQ ID NO: 1774 - protein, 107 aa, synthetic construct; identical to SEQ ID NO: 1733

SEQ ID NO: 1775 - protein, 107 aa, synthetic construct
DIQMTQSPSSLSASVGDRVTITCRASQSVKTYLNWYQQKPGKAPKLLIYAVSSLQSGVPSRFSGSGSGTDFTLTISSLQPEDFATYYCQQSYGSSWTFGGGTKVEIK

SEQ ID NO: 1776 - protein, 107 aa, synthetic construct
DIQMTQSPSSLSASVGDRVTITCRASQSVRNYLNWYQQKPGKAPKLLIYGASKLQRGVPSRFSGSGSGTDFTLTISSLQPEDFATYYCQQSYRTPLTFGGGTKVEIK

SEQ ID NO: 1777 - protein, 107 aa, synthetic construct
DIQMTQSPSSLSASVGDRVTITCRASQSIGTFLNWYQQKPGKAPKLLIYGASGLYSGVPSRFSGSGSGTDFTLTISSLQPEDFATYYCQQSYGNPYTFGGGTKVEIK

SEQ ID NO: 1778 - protein, 107 aa, synthetic construct; identical to SEQ ID NO: 1725

SEQ ID NO: 1779 - protein, 107 aa, synthetic construct
DIQMTQSPSSLSASVGDRVTITCRASQSIGSNLNWYQQKPGKAPKLLIYGASSLKSGVPSRFSGSGSGTDFTLTISSLQPEDFATYYCQQTYSTPRSFGGGTKVEIK

SEQ ID NO: 1780 - protein, 107 aa, synthetic construct
DIQMTQSPSSLSASVGDRVTITCRAGQSIGSYLNWYQQKPGKAPKLLIYRASRLQSGVPSRFSGSGSGTDFTLTISSLQPEDFATYYCQQSYRTPWTFGGGTKVEIK

SEQ ID NO: 1781 - protein, 107 aa, synthetic construct
DIQMTQSPSSLSASVGDRVTITCRASQGISRHLNWYQQKPGKAPKLLIYAASRSQSGVPSRFSGSGSGTDFTLTISSLQPEDFATYYCQESYSAPYTFGGGTKVEIK

SEQ ID NO: 1782 - protein, 107 aa, synthetic construct; identical to SEQ ID NO: 1725

SEQ ID NO: 1783 - protein, 107 aa, synthetic construct; identical to SEQ ID NO: 1725

SEQ ID NO: 1784 - protein, 106 aa, synthetic construct
DIQMTQSPSSLSASVGDRVTITCRTSQSISTYLNWYQQKRKPLKLLIYGASKLQRGVPSRFSGSGSGTDFTLTISSLQPEDFATYYCQQSYTVPITFGGGTKVEIK

SEQ ID NO: 1785 - protein, 107 aa, synthetic construct
DIQMTQSPSSLSASVGDRVTITCRASQSIRDYLNWYQQKPGKAPKLLIYTASRLQSGVPSRFRGSGSGTDFTLTISSLQPEDFATYYCHQSYSTPLTFGGGTKVEIK

SEQ ID NO: 1786 - protein, 107 aa, synthetic construct
DIQMTQSPSSLSATVGDRVTITCRASQAISTYLNWYQQKPGKAPKLLIYAASTLHTGVPSRFSGSGSGTDFTLTISSLQPEDFATYYCQQSHSFPYTFGGGTKVEIK

SEQ ID NO: 1787 - protein, 107 aa, synthetic construct
DIQMTQSPSSLSASVGDRVTITCRASRSISTYLNWYQQKPGKAPKLLIYAASTLQNGVPSRFSGSGSGTDFTLTISSLQPEDFATYYCQQSHSFPWTFGGGTKVEIK

SEQ ID NO: 1788 - protein, 107 aa, synthetic construct
DIQMTQSPSSLSASVGDRVTITCRASQSITRYLNWYQQKPGKAPKLLIYAASRLQGGVPSRFSGSGSGTDFTLTISSLQPEDFATYYCQQSFRTPLTFGGGTKVEIK

SEQ ID NO: 1789 - protein, 107 aa, synthetic construct; identical to SEQ ID NO: 1725

SEQ ID NO: 1790 - protein, 107 aa, synthetic construct
DIQMTQSPSSLSASVGDRVTITCRASQTIRTYLNWYQQKPGKAPKLLIYFASTLQTGVPSRFSGSGSGTDFTLTISSLQPEDFATYYCQQTYNTPRTFGGGTKVEIK

SEQ ID NO: 1791 - protein, 107 aa, synthetic construct
DIQMTQSPSSLSASVGDRVTITCRASQNIGGYLNWYQQKPGKAPKLLIYVASSLESGVPSRFSGSGSGTDFTLTISSLQPEDFATYYCQQTYTTPFTFGGGTKVEIK

SEQ ID NO: 1792 - protein, 107 aa, synthetic construct
DIQMTQSPSSLSASVGDRVTITCRASQTIGNYLNWYQQKPGKAPKLLIYGASRLHSGVPSRFSGSGSGTDFTLTISSLQPEDFATYYCQQSHSAPLTFGGGTKVEIK

SEQ ID NO: 1793 - protein, 107 aa, synthetic construct; identical to SEQ ID NO: 1731

SEQ ID NO: 1794 - protein, 107 aa, synthetic construct
DIQMTQSPSSLSASVGDRVTITCRASQTISNYVNWYQQKPGKAPKLMIYAASRLQSGVPSRFSGSGSGTDFTLTISSLQPEDFATYYCQQSYSSPITFGGGTKVEIK

SEQ ID NO: 1795 - protein, 107 aa, synthetic construct; identical to SEQ ID NO: 1725

SEQ ID NO: 1796 - protein, 107 aa, synthetic construct; identical to SEQ ID NO: 1725

SEQ ID NO: 1797 - protein, 107 aa, synthetic construct; identical to SEQ ID NO: 1725

SEQ ID NO: 1798 - protein, 107 aa, synthetic construct
DIQMTQSPSSLSASVGDRVTITCRASQTISNYVNWYQQKPGKAPKLMIYAASRLQSGVPSRFSGSGSGTDFTLTISSLQPEDFATYYCQQAYSTPLTFGGGTKVEIK

SEQ ID NO: 1799 - protein, 107 aa, synthetic construct
DIQMTQSPSSLSASVGDRVTITCRASQSVSTLLNWYQQKPGKAPKLLIYAASSCNLGSHHASVAVDLGQISLSPSAVCNLKILQLTYCQQSYSFPYTFGGGTKVEIK

SEQ ID NO: 1800 - protein, 107 aa, synthetic construct; identical to SEQ ID NO: 1725

SEQ ID NO: 1801 - protein, 107 aa, synthetic construct; identical to SEQ ID NO: 1725

SEQ ID NO: 1802 - protein, 106 aa, synthetic construct
DIQMTQSPSSLSASVGDRVTITCRASQRISTYLNWYQQKPGKAPKLLIYAASTLYSGVPSRFSGSGSGTDFTLTISSLQPEDFATYYCQQSYTTWTFGGGTKVEIK

SEQ ID NO: 1803 - protein, 108 aa, synthetic construct
DIQMTQSPSSLSASVGDRVTITCRASQGISRHLNWYQQKPGKAPKLLIYKASSLHTGVPSRFSGSGSGTDFTLTISSPQPEDFATYYCQQTLPRTLWTFGGGTKVEIK

SEQ ID NO: 1804 - protein, 107 aa, synthetic construct; identical to SEQ ID NO: 1725

SEQ ID NO: 1805 - protein, 103 aa, synthetic construct; identical to SEQ ID NO: 1732

SEQ ID NO: 1806 - protein, 107 aa, synthetic construct; identical to SEQ ID NO: 1725

SEQ ID NO: 1807 - protein, 108 aa, synthetic construct; identical to SEQ ID NO: 1728

SEQ ID NO: 1808 - protein, 107 aa, synthetic construct; identical to SEQ ID NO: 1725

SEQ ID NO: 1809 - protein, 107 aa, synthetic construct
DIQMTQSPSSLSASVGDRVTITCRASQTISTYLHWYQQKPGKAPKLLIYSASNLQTGVPSRFSGSGSGTDFTLTISSLQPEDFATYYCQQSYDTPRTFGGGTKVEIK

SEQ ID NO: 1810 - protein, 108 aa, synthetic construct
DIQMTQSPSSLSASVGDRVTITCRASQTISNYVNWYQQKPGKAPKLMIYAASRLQSGVPSRFSGSGSGTDFTLTISSLQPEDFATYYCQQSYSTPPETFGGGTKVEIK

SEQ ID NO: 1811 - protein, 107 aa, synthetic construct; identical to SEQ ID NO: 1725

SEQ ID NO: 1812 - protein, 106 aa, synthetic construct
DIQMTQSPSSLSASVGDRVTITCKASDHIGKFLTWYQQKPGKAPKLLIYGRNKRPSGVPSRFSGSGSGTDFTLTISSLQPEDFATYYCQQSYSTPTFGQGTKVEIK

SEQ ID NO: 1813 - protein, 110 aa, synthetic construct
DIQMTQSPSSLSASVGDRVTITCRASQSIRRYLNWYQQKPGKAPKLLIYGNNNRPSGVPSRFSGSGSGTDFTLTISSLQPEDFATYYCSTRSRKGNPHVLFGQGTKVEIK

SEQ ID NO: 1814 - protein, 115 aa, synthetic construct
DIQMTQSPSSLSASVGDRVTITCKSSQSLLYSNGKTFLSWYQQKPGKAPKLLIYENNNRPSGVPSRFSGSGSGTDFTLTISSLQPEDFATYYCATRAVRGNPHVLFGQGTKVEIK

SEQ ID NO: 1815 - protein, 107 aa, synthetic construct
DIQMTQSPSSLSASVGDRVTITCQASQSISSYLAWYQQKPGKAPKLLIYGRNKRPSGVPSRFSGSGSGTDFTLTISSLQPEDFATYYCAQTGTHPTTFGQGTKVEIK

SEQ ID NO: 1816 - protein, 107 aa, synthetic construct
DIQMTQSPSSLSASVGDRVTITCKASDHIGKFLTWYQQKPGKAPKLLIYHTSRLQSGVPSRFSGSGSGTDFTLTISSLQPEDFATYYCQQGFSNPWTFGQGTKVEIK

SEQ ID NO: 1817 - protein, 108 aa, synthetic construct
DIQMTQSPSSLSASVGDRVTITCRASQSISSYVNWYQQKPGKAPKLLIYKKRPSGVPSRFSGSGSGTDFTLTINSLQPEDFATYYCATRAVRGNPHVLFGQGTKVEIK

SEQ ID NO: 1818 - protein, 107 aa, synthetic construct
DIQMTQSPSSLSASVGDRVTITCRPSQRISRYLNWYQQKPGKAPKLLIYQNDKRPSGVPSRFSGSGSGTDFTLTISSLQPEDFATYYCSQNTHVPYTFGQGTKVEIK

SEQ ID NO: 1819 - protein, 106 aa, synthetic construct
DIQMTQSPSSLSASVGDRVTITCRASSSVSYMHWYQQKPGKAPKLLIYGKKNRPSGVPSRFSGSGSGTDFTLTISSLQPEDFATYYCSQGTHVPPTFGQGTKVEIK

SEQ ID NO: 1820 - protein, 107 aa, synthetic construct
DIQMTQSPSSLSASVGDRVTITCKASENVDTYVSWYQQKPGKAPKLLIYGRNKRPSGVPSRFSGSGSGTDFTLTISSLQPEDFATYYCGQSYRYPLTFGQGTKVEIK

SEQ ID NO: 1821 - protein, 110 aa, synthetic construct
DIQMTQSPSSLSASVGDRVTITCRASQSVRSYLNWYQQKPGKAPKLLIYGRNKRPSGVPSRFSGSGSGTDFTLTISSLQPEDFATYYCSARSVRGNPHVLFGQGTKVEIK

SEQ ID NO: 1822 - protein, 110 aa, synthetic construct
DIQMTQSPSSLSASVGDRVTITCSGDKLRNKYASWYQQKPGKAPKLLIYHTSRLQSGVPSRFSGSGSGTDFTLTISSLQPEDFATYYCTTRSNKGNPHVLFGQGTKVEIK

SEQ ID NO: 1823 - protein, 110 aa, synthetic construct
DIQMTQSPSSLSASVGDRVTITCSGDKLGHTYTSWYQQKPGKAPKLLIYRKSNRPSGVPSRFSGSGSGTDFTLTISSLQPEDFATYYCYSRDRSGNHLGMFGQGTKVEIK

SEQ ID NO: 1824 - protein, 110 aa, synthetic construct
DIQMTQSPSSLSASVGDRVTITCSGDKLRNKYASWYQQKPGKAPKLLIYGASSRATGVPSRFSGSGSGTDFTLTISSLQPEDFATYYCATRAVRGNPHVLFGQGTKVEIK

SEQ ID NO: 1825 - protein, 110 aa, synthetic construct
DIQMTQSPSSLSASVGDRVTITCSGDKLGHTYTSWYQQKPGKAPKLLIYHTSRLQSGVPSRFSGSGSGTDFTLTISSLQPEDFATYYCSARSVRGKPHVLFGQGTKVEIK

SEQ ID NO: 1826 - protein, 107 aa, synthetic construct
DIQMTQSPSSLSASVGDRVTITCRASQGVRTSLAWYQQKPGKAPKLLIYHTSRLHSGVPSRFSGSGSGTDFTLTISSLQPEDFATYYCFQGSHIPYTFGQGTKVEIK

SEQ ID NO: 1827 - protein, 110 aa, synthetic construct
DIQMTQSPSSLSASVGDRVTITCSGDTLGGKYAWWYQQKPGKAPKLLIYGKKNRPSGVPSRFSGSGSGTDFTLTISSLQPEDFATYYCSTRSSKGNPHVLFGQGTKVEIK

SEQ ID NO: 1828 - protein, 107 aa, synthetic construct
DIQMTQSPSSLSASVGDRVTITCRASQSIRRYLNWYQQKPGKAPKLLIYGATILADGVPSRFSGSGSGTDFTLTISSLQPEDFATYYCSQNTHVPYTFGQGTKVEIK

SEQ ID NO: 1829 - protein, 107 aa, synthetic construct
DIQMTQSPSSLSASVGDRVTITCRPSQRISRYLNWYQQKPGKAPKLLIYRASTLASGVPSRFSGSGSGTDFTLTISSLQPEDFATYYCQQSLRTPFTFGQGTKVEIK

SEQ ID NO: 1830 - protein, 109 aa, synthetic construct
DIQMTQSPSSLSASVGDRVTITCSASSSVSYMYWYQQKPGKAPKLLIYHDNKRPSGVPSRFSGSGSGTDFTLTISSLQPEDFATYYCATRAVRGNPHVLFGQGTKVEIK

SEQ ID NO: 1831 - protein, 110 aa, synthetic construct
DIQMTQSPSSLSASVGDRVTITCRASQDVSSGVAWYQQKPGKAPKLLIYGKKNRPSGVPSRFSGSGSGTDFTLTISSLQPEDFATYYCASRSSKGNPHVLFGQGTKVEIK

SEQ ID NO: 1832 - protein, 110 aa, synthetic construct
DIQMTQSPSSLSASVGDRVTITCRASQSVDRYFNWYQQKPGKAPKLLIYGKKNRPSGVPSRFSGSGSGTDFTLTISSLQPEDFATYYCASRSSKGNPHVLFGQGTKVEIK

SEQ ID NO: 1833 - protein, 107 aa, synthetic construct
DIQMTQSPSSLSASVGDRVTITCRASQSISGYLNWYQQKPGKAPKLLIYRKSNRPSGVPSRFSGSGSGTDFTLTISSLQPEDFATYYCQNGHSFPLTFGQGTKVEIK

SEQ ID NO: 1834 - protein, 107 aa, synthetic construct
DIQMTQSPSSLSASVGDRVTITCRASQSIRRYLNWYQQKPGKAPKLLIYDTSKVASGVPSRFSGSGSGTDFTLTISSLQPEDFATYYCQQSYSIPRTFGQGTKVEIK

SEQ ID NO: 1835 - protein, 110 aa, synthetic construct
DIQMTQSPSSLSASVGDRVTITCSGDRLGEKYVSWYQQKPGKAPKLLIYGASNLHSGVPSRFSGSGSGTDFTLTISSLQPEDFATYYCSTRSRKGNPHVLFGQGTKVEIK

SEQ ID NO: 1836 - protein, 107 aa, synthetic construct
DIQMTQSPSSLSASVGDRVTITCRASQSIREYLHWYQQKPGKAPKLLIYGASSSATGVPSRFSGSGSGTDFTLTISSLQPEDFATYYCQQSYRTPWTFGQGTKVEIK

SEQ ID NO: 1837 - protein, 107 aa, synthetic construct
DIQMTQSPSSLSASVGDRVTITCKASENVDTYVSWYQQKPGKAPKLLIYGRNKRPSGVPSRFSGSGSGTDFTLTISSLQPEDFATYYCQQGHTLPWTFGQGTKVEIK

SEQ ID NO: 1838 - protein, 110 aa, synthetic construct
DIQMTQSPSSLSASVGDRVTITCSGDNLRGYYASWYQQKPGKAPKLLIYHTSRLQSGVPSRFSGSGSGTDFTLTISSLQPEDFATYYCSTRSRKGNPHVLFGQGTEVEIK

SEQ ID NO: 1839 - protein, 107 aa, synthetic construct
DIQMTQSPSSLSASVGDRVTITCRASQSIRRYLNWYQQKPGKAPKLLIYATSTLQSGVPSRFSGSGSGTDFTLTISSLQPEDFATYYCQQSYSTPRTFGQGTKVEIK

SEQ ID NO: 1840 - protein, 106 aa, synthetic construct
DIQMTQSPSSLSASVGDRVTITCRASQTIERRLNWYQQKPGKAPKLLIYHTSRLHSGVPSRFSGSGSGTDFTLTISSLQPEDFATYYCQQSYSTPSFGQGTKVEIK

SEQ ID NO: 1841 - protein, 110 aa, synthetic construct
DIQMTQSPSSLSASVGDRVTITCSGDKLRNKYASWYQQKPGKAPKLLIYENNNRPSGVPSRFSGSGSGTDFTLTISSLQPEDFATYYCASRSSKGNPHVLFGQGTKVEIK

SEQ ID NO: 1842 - protein, 107 aa, synthetic construct
DIQMTQSPSSLSASVGDRVTITCRTSQSLSSYLHWYQQKPGKAPKLLIYQNDKRPSGVPSRFSGSGSGTDFTLTISSLQPEDFATYYCQQGNTLPYTFGQGTKVEIK

SEQ ID NO: 1843 - protein, 116 aa, synthetic construct
DIQMTQSPSSLSASVGDRVTITCTSSQSLFNVRSQKNYLAWYQQKPGKAPKLLIYGASSRATGVPSRFSGSGSGTDFTLTISSLQPEDFATYYCNSRDTSGNHIGVFGQGTKVEIK

SEQ ID NO: 1844 - protein, 107 aa, synthetic construct
DIQMTQSPSSLSASVGDRVTITCRASQTIERRLNWYQQKPGKAPKLLIYGRNKRPSGVPSRFSGSGSGTDFTLTISSLQPEDFATYYCGQSYRYPLTFGQGTKVEIK

SEQ ID NO: 1845 - protein, 109 aa, synthetic construct
DIQMTQSPSSLSASVGDRVTITCRASQRISSFLNWYQQKPGKAPKLLIYGRNKRPSGVPSRFSGSGSGTDFTLTISSLQPEDFATYYCSSWAGSRSGTVFGQGTKVEIK

SEQ ID NO: 1846 - protein, 110 aa, synthetic construct
DIQMTQSPSSLSASVGDRVTITCSGDKLGDKYTSWYQQKPGKAPKLLIYGQHNRPSGVPSRFSGSGSGTDFTLTISSLQPEDFATYYCSTRSRKGNPHVLFGQGTKVEIK

SEQ ID NO: 1847 - protein, 107 aa, synthetic construct
DIQMTQSPSSLSASVGDRVTITCSGGSGSYGWYQQKPGKAPKLLIYGKNIRPSGVPSRFSGSGSGTDFTLTISSLQPEDFATYYCASRSSKGNPHVLFGQGTKVEIK

SEQ ID NO: 1848 - protein, 107 aa, synthetic construct
DIQMTQSPSSLSASVGDRVTITCSGDKLRNKYASWYQQKPGKAPKLLIYGNNNRPSGVPSRFSGSGSGTDFTLTISSLQPEDFATYYCQQSYKSPLTFGQGTKVEIK

SEQ ID NO: 1849 - protein, 106 aa, synthetic construct
DIQMTQSPSSLSASVGDRVTITCRASQSISGYLNWYQQKPGKAPKLLIYQNDKRPSGVPSRFSGSGSGTDFTLTISSLQPEDFATYYCQQGRRLWSFGQGTKVEIK

SEQ ID NO: 1850 - protein, 107 aa, synthetic construct
DIQMTQSPSSLSASVGDRVTITCKASDHIGKFLTWYQQKPGKAPKLLIYGASTLQSGVPSRFSGSGSGTDFTLTISSLQPEDFATYYCQQSYNTPRTFGQGTKVEIK

SEQ ID NO: 1851 - protein, 107 aa, synthetic construct
DIQMTQSPSSLSASVGDRVTITCRASQGVRTSLAWYQQKPGKAPKLLIYPKHNRPPGVPSRFSGSGSGTDFTLTISSLQPEDFATYYCAQTGTHPTTFGQGTKVEIK

SEQ ID NO: 1852 - protein, 107 aa, synthetic construct
DIQMTQSPSSLSASVGDRVTITCRASQGVRTSLAWYQQKPGKAPKLLIYGKKNRPSGVPSRFSGSGSGTDFTLTISSLQPEDFATYYCGQSYRYPLTFGQGTKVEIK

SEQ ID NO: 1853 - protein, 109 aa, synthetic construct
DIQMTQSPSSLSASVGDRVTITCKASDHIGKFLTWYQQKPGKAPKLLIYGRNKRPSGVPSRFSGSGSGTDFTLTISSLQPEDFATYYCNSRDTSGLHYVFGQGTKVEIK

SEQ ID NO: 1854 - protein, 109 aa, synthetic construct
DIQMTQSPSSLSASVGDRVTITCRASQGVRTSLAWYQQKPGKAPKLLIYGRNKRPSGVPSRFSGSGSGTDFTLTISSLQPEDFATYYCSSWAGSRSGTVFGQGTKVEIK

SEQ ID NO: 1855 - protein, 110 aa, synthetic construct
DIQMTQSPSSLSASVGDRVTITCSGDKLRNKYASWYQQKPGKAPKLLIYGNNNRPSGVPSRFSGSGSGTDFTLTISSLQPEDFATYYCASRSSKGNPHVLFGQGTKVEIK

SEQ ID NO: 1856 - protein, 111 aa, synthetic construct
DIQMTQSPSSLSASVGDRVTITCSASSSVSSSYLHWYQQKPGKAPKLLIYKVSNRFSGVPSRFSGSGSGTDFTLTISSLQPEDFATYYCSTRSSKGNPHVLFGQGTKVEIK

SEQ ID NO: 1857 - protein, 110 aa, synthetic construct; identical to SEQ ID NO: 1824

SEQ ID NO: 1858 - protein, 110 aa, synthetic construct
DIQMTQSPSSLSASVGDRVTITCRASQGVRTSLAWYQQKPGKAPKLLIYHDNKRPSGVPSRFSGSGSGTDFTLTISSLQPEDFATYYCATRAVRGNPHVLFGQGTKVEIK

SEQ ID NO: 1859 - protein, 109 aa, synthetic construct
DIQMTQSPSSLSASVGDRVTITCRASQSIRRYLNWYQQKPGKAPKLLIYAASGLPSGVPSRFSGSGSGTDFTLTISSLQPEDFATYYCSSWAGSRSGTVFGQGTKVEIK

SEQ ID NO: 1860 - protein, 107 aa, synthetic construct
DIQMTQSPSSLSASVGDRVTITCRASQGVRTSLAWYQQKPGKAPKLLIYGRNKRPSGVPSRFSGSGSGTDFTLTISSLQPEDFATYYCGQSYRYPLTFGQGTKVEIK

SEQ ID NO: 1861 - protein, 110 aa, synthetic construct
DIQMTQSPSSLSASVGDRVTITCRTSQDIGNYLNWYQQKPGKAPKLLIYGKNIRPSGVPSRFSGSGSGTDFTLTISSLQPEDFATYYCSTRSRKGNPHVLFGQGTKVEIK

SEQ ID NO: 1862 - protein, 107 aa, synthetic construct
DIQMTQSPSSLSASVGDRVTITCSASSSVSSSYLHWYQQKPGKAPKLLIYRKSNRPSGVPSRFSGSGSGTDFTLTISSLQPEDFATYYCQQSYSTPTFGQGTKVEIK

SEQ ID NO: 1863 - protein, 107 aa, synthetic construct
DIQMTQSPSSLSASVGDRVTITCKASQHVITHVTWYQQKPGKAPKLLIYQNDKRPSGVPSRFSGSGSGTDFTLTISSLQPEDFATYYCQQSYGTSWTFGQGTKVEIK

SEQ ID NO: 1864 - protein, 107 aa, synthetic construct
DIQMTQSPSSLSASVGDRVTITCRASHNINSYLNWYQQKPGKAPKLLIYGKKNRPSGVPSRFSGSGSGTDFTLTISSLQPEDFATYYCQQSFSTPLTFGQGTKVEIK

SEQ ID NO: 1865 - protein, 107 aa, synthetic construct
DIQMTQSPSSLSASVGDRVTITCRASQNIRSYLNWYQQKPGKAPKLLIYGASRLQRGVPSRFSGSGSGTDFTLTISSLQPEDFATYYCQQGDALPPTFGQGTKVEIK

SEQ ID NO: 1866 - protein, 107 aa, synthetic construct
DIQMTQSPSSLSASVGDRVTITCRASQGVRTSLAWYQQKPGKAPKLLIYGRNKRPSGVPSRFSGSGSGTDFTLTISSLQPEDFATYYCQQSYSTPRTFGQGTKVEIK

SEQ ID NO: 1867 - protein, 107 aa, synthetic construct
DIQMTQSPSSLSASVGDRVTITCRASQGVRTSLAWYQQKPGKAPKLLIYRKSNRPSGVPSRFSGSGSGTDFTLTISSLQPEDFATYYCQQGFSNPWTFGQGTKVEIK

SEQ ID NO: 1868 - protein, 110 aa, synthetic construct
DIQMTQSPSSLSASVGDRVTITCRASQGVRTSLAWYQQKPGKAPKLLIYRASTLASGVPSRFSGSGSGTDFTLTISSLQPEDFATYYCASRSSKGNPHVLFGQGTKVEIK

SEQ ID NO: 1869 - protein, 109 aa, synthetic construct
DIQMTQSPSSLSASVGDRVTITCQSSQSVYSNNELSWYQQKPGKAPKLLIYGRNKRPSGVPSRFSGSGSGTDFTLTISSLQPEDFATYYCSQGTHVPPTFGQGTKVEIK

SEQ ID NO: 1870 - protein, 110 aa, synthetic construct
DIQMTQSPSSLSASVGDRVTITCRASQSISNNLNWYQQKPGKAPKLLIYRKSNRPSGVPSRFSGSGSGTDFTLTISSLQPEDFATYYCASRSSKGNPHVLFGQGTKVEIK

SEQ ID NO: 1871 - protein, 106 aa, synthetic construct
DIQMTQSPSSLSASVGDRVTITCRASQDIKNYLNWYQQKPGKAPKLLIYGRNKRPSGVPSRFSGSGSGTDFTLTISSLQPEDFATYYCQQDIKHPTFGQGTKVEIK

SEQ ID NO: 1872 - protein, 107 aa, synthetic construct
DIQMTQSPSSLSASVGDRVTITCRASHNINSYLNWYQQKPGKAPKLLIYGRNKRPSGVPSRFSGSGSGTDFTLTISSLQPEDFATYYCQQGHTLPWTFGQGTKVEIK

SEQ ID NO: 1873 - protein, 107 aa, synthetic construct
DIQMTQSPSSLSASVGDRVTITCRASQSVDRYFNWYQQKPGKAPKLLIYGRNKRPSGVPSRFSGSGSGTDFTLTISSLQPEDFATYYCQQSYSFPLTFGQGTKVEIK

SEQ ID NO: 1874 - protein, 108 aa, synthetic construct
DIQMTQSPSSLSASVGDRVTITCRASQNIRSYLNWYQQKPGKAPKLLIYAKNNRPSGVPSRFSGSGSGTDFTLTISSLQPEDFATYYCASRDRSGHGVFGQGTKVEIK

SEQ ID NO: 1875 - protein, 110 aa, synthetic construct
DIQMTQSPSSLSASVGDRVTITCRASQDVSSGVAWYQQKPGKAPKLLIYPKHNRPPGVPSRFSGSGSGTDFTLTISSLQPEDFATYYCSARSVRGNPHVLFGQGTKVEIK

SEQ ID NO: 1876 - protein, 112 aa, synthetic construct
DIQMTQSPSSLSASVGDRVTITCKASDHIGKFLTWYQQKPGKAPKLLIYGNNNRPSGVPSRFSGSGSGTDFTLTISSLQPEDFATYYCQTNYGTSSSNYGFAFGQGTKVEIK

SEQ ID NO: 1877 - protein, 110 aa, synthetic construct
DIQMTQSPSSLSASVGDRVTITCRASHNINSYLNWYQQKPGKAPKLLIYGTTSLESGVPSRFSGSGSGTDFTLTISSLQPEDFATYYCSTRSSKGNPHVLFGQGTKVEIK

SEQ ID NO: 1878 - protein, 107 aa, synthetic construct
DIQMTQSPSSLSASVGDRVTITCRASQDIYQNLDWYQQKPGKAPKLLIYQMSHLASGVPSRFSGSGSGTDFTLTISSLQPEDFATYYCQQGKTLPLTFGQGTKVEIK

SEQ ID NO: 1879 - protein, 110 aa, synthetic construct
DIQMTQSPSSLSASVGDRVTITCQGASLRNYYASWYQQKPGKAPKLLIYGNNNRPSGVPSRFSGSGSGTDFTLTISSLQPEDFATYYCASRSSKGNPHVLFGQGTKVEIK

SEQ ID NO: 1880 - protein, 107 aa, synthetic construct
DIQMTQSPSSLSASVGDRVTITCRASQSISGYLNWYQQKPGKAPKLLIYGNNNRPSGVPSRFSGSGSGTDFTLTISSLQPEDFATYYCSQNTHVPYTFGQGTKVEIK

SEQ ID NO: 1881 - protein, 110 aa, synthetic construct
DIQMTQSPSSLSASVGDRVTITCRASQSVDRYFNWYQQKPGKAPKLLIYGASRLQRGVPSRFSGSGSGTDFTLTISSLQPEDFATYYCSSRSRHGNPHVLFGQGTKVEIK

SEQ ID NO: 1882 - protein, 115 aa, synthetic construct
DIQMTQSPSSLSASVGDRVTITCTSSQSLFNVRSQKNYLAWYQQKPGKAPKLLIYAASTLQRGVPSRFSGSGSGTDFTLTISSLQPEDFATYYCGGGYSSISDTTFGQGTKVGIK

SEQ ID NO: 1883 - protein, 107 aa, synthetic construct
DIQMTQSPSSLSASVGDRVTITCRASENIYSNLAWYQQKPGKAPKLLIYKVSNRFSGVPSRFSGSGSGTDFTLTISSLQPEDFATYYCGQGVLWPATFGQGTKVEIK

SEQ ID NO: 1884 - protein, 107 aa, synthetic construct
DIQMTQSPSSLSASVGDRVTITCSGDKLRNKYASWYQQKPGKAPKLLIYRKSNRPSGVPSRFSGSGSGTDFTLTISSLQPEDFATYYCQAWDTNTVVFGQGTKVEIK

SEQ ID NO: 1885 - protein, 110 aa, synthetic construct
DIQMTQSPSSLSASVGDRVTITCSGDRLGEKYVSWYQQKPGKAPKLLIYENNNRPSGVPSRFSGSGSGTDFTLTISSLQPEDFATYYCVARAVRGNPHVLFGQGTKVEIK

SEQ ID NO: 1886 - protein, 107 aa, synthetic construct
DIQMTQSPSSLSASVGDRVTITCRASQGVRTSLAWYQQKPGKAPKLLIYAKNNRPSGVPSRFSGSGSGTDFTLTISSLQPEDFATYYCQQSYSSAPTFGQGTKVEIK

SEQ ID NO: 1887 - protein, 110 aa, synthetic construct
DIQMTQSPSSLSASVGDRVTITCSGDKLRNKYASWYQQKPGKAPKLLIYQNDKRPSGVPSRFSGSGSGTDFTLTISSLQPEDFATYYCSARSVRGNPHVLFGQGTKVEIK

SEQ ID NO: 1888 - protein, 107 aa, synthetic construct
DIQMTQSPSSLSASVGDRVTITCSGNKLGDKYASWYQQKPGKAPKLLIYGRNKRPSGVPSRFSGSGSGTDFTLTISSLQPEDFATYYCQQDLYPPYTFGQGTKVEIK

SEQ ID NO: 1889 - protein, 107 aa, synthetic construct
DIQMTQSPSSLSASVGDRVTITCSASQDINKYLNWYQQKPGKAPKLLIYHTSRLHSGVPSRFSGSGSGTDFTLTISSLQPEDFATYYCQQGKTLPLTFGQGTKVEIK

SEQ ID NO: 1890 - protein, 107 aa, synthetic construct
DIQMTQSPSSLSASVGDRVTITCRTSQSLSSYLHWYQQKPGKAPKLLIYGKKNRPSGVPSRFSGSGSGTDFTLTISSLQPEDFATYYCQQGYRFPLTFGQGTKVEIK

SEQ ID NO: 1891 - protein, 107 aa, synthetic construct
DIQMTQSPSSLSASVGDRVTITCSGDKLRNKYASWYQQKPGKAPKLLIYGRNKRPSGVPSRFSGSGSGTDFTLTISSLQPEDFATYYCQQSYSFPRTFGQGTKVEIK

SEQ ID NO: 1892 - protein, 107 aa, synthetic construct
DIQMTQSPSSLSASVGDRVTITCRASQSVDRYFNWYQQKPGKAPKLLIYGKNIRPSGVPSRFSGSGSGTDFTLTISSLQPEDFATYYCGQSYRYPLTFGQGTKVEIK

SEQ ID NO: 1893 - protein, 108 aa, synthetic construct
DIQMTQSPSSLSASVGDRVTITCRASQPIGPDLLWYQQKPGKAPKLLIYGASRLQRGVPSRFSGSGSGTDFTLTISSLQPEDFATYYCASRNGWNHVVFGQGTKVEIK

SEQ ID NO: 1894 - protein, 110 aa, synthetic construct
DIQMTQSPSSLSASVGDRVTITCRASQGVRTSLAWYQQKPGKAPKLLIYGKKNRPSGVPSRFSGSGSGTDFTLTISSLQPEDFATYYCSTRSRKGNPHVLFGQGTKVEIK

SEQ ID NO: 1895 - protein, 110 aa, synthetic construct
DIQMTQSPSSLSASVGDRVTITCSGDKLGHTYTSWYQQKPGKAPKLLIYRKSNRPSGVPSRFSGSGSGTDFTLTISSLQPEDFATYYCVARGTRGNPHVLFGQGTKVEIK

SEQ ID NO: 1896 - protein, 107 aa, synthetic construct
DIQMTQSPSSLSASVGDRVTITCRASQSISNNLNWYQQKPGKAPKLLIYRKSNRPSGVPSRFSGSGSGTDFTLTISSLQPEDFATYYCQQSNSWPYTFGQGTKVEIK

SEQ ID NO: 1897 - protein, 110 aa, synthetic construct
DIQMTQSPSSLSASVGDRVTITCSGDNLRGYYASWYQQKPGKAPKLLIYGASRLQRGVPSRFSGSGSGTDFTLTISSLQPEDFATYYCMARSRKGNPHVLFGQGTKVEIK

SEQ ID NO: 1898 - protein, 110 aa, synthetic construct
DIQMTQSPSSLSASVGDRVTITCSGDKLRNKYASWYQQKPGKAPKLLIYPKHNRPPGVPSRFSGSGSGTDFTLTISSLQPEDFATYYCSTRSSKGNPHVLFGQGTKVEIK

SEQ ID NO: 1899 - protein, 106 aa, synthetic construct
DIQMTQSPSSLSASVGDRVTITCRTSQDISNYLNWYQQKPGKAPKLLIYGASSRATGVPSRFSGSGSGTDFTLTISSLQPEDFATYYCQQSYSTPSFGQGTKVEIK

SEQ ID NO: 1900 - protein, 111 aa, synthetic construct
DIQMTQSPSSLSASVGDRVTITCQSSQSVYSNNELSWYQQKPGKAPKLLIYDASNLQSGVPSRFSGSGSGTDFTLTISSLQPEDFATYYCQSRATSGNPVVFGQGTKVEIK

SEQ ID NO: 1901 - protein, 110 aa, synthetic construct
DIQMTQSPSSLSASVGDRVTITCRTSQDISNYLNWYQQKPGKAPKLLIYDASSLHTGVPSRFSGSGSGTDFTLTISSLQPEDFATYYCQQGYSLRNIDNAFGQGTKVEIK

SEQ ID NO: 1902 - protein, 107 aa, synthetic construct
DIQMTQSPSSLSASVGDRVTITCRPNQNIATYINWYQQKPGKAPKLLIYGKKNRPSGVPSRFSGSGSGTDFTLTISSLQPEDFATYYCQQGKTLPLTFGQGTKVEIK

SEQ ID NO: 1903 - protein, 107 aa, synthetic construct
DIQMTQSPSSLSASVGDRVTITCSASQDINKYLNWYQQKPGKAPKLLIYGQHNRPSGVPSRFSGSGSGTDFTLTISSLQPEDFATYYCQQSYSSAPTFGQGTKVEIK

SEQ ID NO: 1904 - protein, 107 aa, synthetic construct
DIQMTQSPSSLSASVGDRVTITCRASQSIRRYLNWYQQKPGKAPKLLIYAASGLPSGVPSRFSGSGSGTDFTLTISSLQPEDFATYYCGQGVLWPATFGQGTKVEIK

SEQ ID NO: 1905 - protein, 106 aa, synthetic construct; identical to SEQ ID NO: 1812

SEQ ID NO: 1906 - protein, 107 aa, synthetic construct
DIQMTQSPSSLSASVGDRVTITCKASDHIGKFLTWYQQKPGKAPKLLIYGRNKRPSGVPSRFSGSGSGTDFTLTISSLQPEDFATYYCQQTVVAPPLFGQGTKVEIK

SEQ ID NO: 1907 - protein, 107 aa, synthetic construct
DIQMTQSPSSLSASVGDRVTITCSASQDINKYLNWYQQKPGKAPKLLIYAASTLQRGVPSRFSGSGSGTDFTLTISSLQPEDFATYYCQQSYIIPPTFGQGTKVEIK

SEQ ID NO: 1908 - protein, 106 aa, synthetic construct
DIQMTQSPSSLSASVGDRVTITCRTSQDISNYLNWYQQKPGKAPKLLIYAASSLYSGVPSRFSGSGSGTDFTLTISSLQPEDFATYYCQQTFSIPLFGQGTKVEIK

SEQ ID NO: 1909 - protein, 106 aa, synthetic construct
DIQMTQSPSSLSASVGDRVTITCRTSQDISNYLNWYQQKPGKAPKLLIYGRNKRPSGVPSRFSGSGSGTDFTLTISSLQPEDFATYYCQQSFSVPAFGQGTKVEIK

SEQ ID NO: 1910 - protein, 106 aa, synthetic construct
DIQMTQSPSSLSASVGDRVTITCSGDLRNKYASWYQQKPGKAPKLLIYGASTLQSGVPSRFSGSGSGTDFTLTISSLQPEDFATYYCAQGWGRPVTFGQGTKVEIK

SEQ ID NO: 1911 - protein, 106 aa, synthetic construct
DIQMTQSPSSLSASVGDRVTITCRASQDIGNFLNWYQQKPGKAPKLLIYQDFKRPSGVPSRFSGSGSGTDFTLTISSLQPEDFATYYCQQSYSTPTFGQGTKVEIK

SEQ ID NO: 1912 - protein, 109 aa, synthetic construct
DIQMTQSPSSLSASVGDRVTITCRASSSVSYMHWYQQKPGKAPKLLIYGKNIRPSGVPSRFSGSGSGTDFTLTISSLQPEDFATYYCSARSVRGNPHVLFGQGTKVEIK

SEQ ID NO: 1913 - protein, 110 aa, synthetic construct
DIQMTQSPSSLSASVGDRVTITCRASQGVRTSLAWYQQKPGKAPKLLIYHTSRLQDGVPSRFSGSGSGTDFTLTISSLQPEDFATYYCASRSSKGNPHVLFGQGTKVEIK

SEQ ID NO: 1914 - protein, 109 aa, synthetic construct
DIQMTQSPSSLSASVGDRVTITCSGDLGEKYVSWYQQKPGKAPKLLIYKVSNRFSGVPSRFSGSGSGTDFTLTISSLQPEDFATYYCSTRSSKGNPHVLFGQGTKVEIK

SEQ ID NO: 1915 - protein, 105 aa, synthetic construct
DIQMTQSPSSLSASVGDRVTITCRASSSVSYHWYQQKPGKAPKLLIYDTSKVASGVPSRFSGSGSGTDFTLTISSLQPEDFATYYCSQSTRVPPTFGQGTKVEIK

SEQ ID NO: 1916 - protein, 107 aa, synthetic construct
DIQMTQSPSSLSASVGDRVTITCSASSVSSSYLHWYQQKPGKAPKLLIYGASNLHSGVPSRFSGSGSGTDFTLTISSLQPEDFATYYCQQSYSYPRTFGQGTKVEIK

SEQ ID NO: 1917 - protein, 106 aa, synthetic construct; identical to SEQ ID NO: 1812

SEQ ID NO: 1918 - protein, 107 aa, synthetic construct
DIQMTQSPSSLSASVGDRVTITCRASQSVRSYLNWYQQKPGKAPKLLIYGASRLQRGVPSRFSGSGSGTDFTLTISSLQPEDFATYYCQQSYRTPLTFGQGTKVEIK

SEQ ID NO: 1919 - protein, 107 aa, synthetic construct
DIQMTQSPSSLSASVGDRVTITCRASQSIRRYLNWYQQKPGKAPKLLIYAKNNRPSGVPSRFSGSGSGTDFTLTISSLQPEDFATYYCQQGDALPPTFGQGTKVEIK

SEQ ID NO: 1920 - protein, 107 aa, synthetic construct
DIQMTQSPSSLSASVGDRVTITCRASQRISSFLNWYQQKPGKAPKLLIYPKHNRPPGVPSRFSGSGSGTDFTLTISSLQPEDFATYYCQQSYETPLTFGQGTKVEIK

SEQ ID NO: 1921 - protein, 109 aa, synthetic construct
DIQMTQSPSSLSASVGDRVTITCSGDLRNKYASWYQQKPGKAPKLLIYQNDKRPSGVPSRFSGSGSGTDFTLTISSLQPEDFATYYCATRAVRGNPHVLFGQGTKVEIK

SEQ ID NO: 1922 - protein, 110 aa, synthetic construct
DIQMTQSPSSLSASVGDRVTITCRASENIYSNLAWYQQKPGKAPKLLIYPKHNRPPGVPSRFSGSGSGTDFTLTISSLQPEDFATYYCVTRNRYGNPHVLFGQGTKVEIK

SEQ ID NO: 1923 - protein, 106 aa, synthetic construct
DIQMTQSPSSLSASVGDRVTITCRASQNIRSYLNWYQQKPGKAPKLLIYRKSNRPSGVPSRFSGSGSGTDFTLTISSLQPEDFATYYCQQGRRLWSFGQGTKVEIK

SEQ ID NO: 1924 - protein, 106 aa, synthetic construct; identical to SEQ ID NO: 1812

SEQ ID NO: 1925 - protein, 107 aa, synthetic construct
DIQMTQSPSSLSASVGDRVTITCRASQTISSYLNWYQQKPGKAPKLLIYRKSNRPSGVPSRFSGSGSGTDFTLTISSLQPEDFATYYCSQGTHVPPTFGQGTKVEIK

SEQ ID NO: 1926 - protein, 107 aa, synthetic construct
DIQMTQSPSSLSASVGDRVTITCRASQTIERRLNWYQQKPGKAPKLLIYGENSRPSGVPSRFSGSGSGTDFTLTISSLQPEDFATYYCQQGYRWPVTFGQGTKVEIK

SEQ ID NO: 1927 - protein, 107 aa, synthetic construct
DIQMTQSPSSLSASVGDRVTITCRASQSIVTYLNWYQQKPGKAPKLLIYGRNKRPSGVPSRFSGSGSGTDFTLTISSLQPEDFATYYCQQGYRWPVTFGQGTKVEIK

SEQ ID NO: 1928 - protein, 107 aa, synthetic construct
DIQMTQSPSSLSASVGDRVTITCRASQGVRTSLAWYQQKPGKAPKLLIYHTSRLHSGVPSRFSGSGSGTDFTLTISSLQPEDFATYYCSQGTHVPPTFGQGTKVEIK

SEQ ID NO: 1929 - protein, 106 aa, synthetic construct; identical to SEQ ID NO: 1812

SEQ ID NO: 1930 - protein, 110 aa, synthetic construct
DIQMTQSPSSLSASVGDRVTITCRASQSIRRFLNWYQQKPGKAPKLLIYNTSRLQDGVPSRFSGSGSGTDFTLTISSLQPEDFATYYCASRSSKGNPHVLFGQGTKVEIK

SEQ ID NO: 1931 - protein, 106 aa, synthetic construct
DIQMTQSPSSLSASVGDRVTITCRTSQDISNYLNWYQQKPGKAPKLLIYAVTSRASGVPSRFSGSGSGTDFTLTISSLQPEDFATYYCQQSFSVPAFGQGTKVEIK

SEQ ID NO: 1932 - protein, 106 aa, synthetic construct; identical to SEQ ID NO: 1812

SEQ ID NO: 1933 - protein, 110 aa, synthetic construct
DIQMTQSPSSLSASVGDRVTITCRASQSISSYVNWYQQKPGKAPKLLIYGRNKRPSGVPSRFSGSGSGTDFTLTISSLQPEDFATYYCSTRSSKGNPHVLFGQGTKVEIK

SEQ ID NO: 1934 - protein, 107 aa, synthetic construct
DIQMTQSPSSLSASVGDRVTITCRASQDVSSGVAWYQQKPGKAPKLLIYAASTLQRGVPSRFSGSGSGTDFTLTISSLQPEDFATYYCSQSTRVPPTFGQGTKVEIK

SEQ ID NO: 1935 - protein, 106 aa, synthetic construct
DIQMTQSPSSLSASVGDRVTITCSASSSVSYMYWYQQKPGKAPKLLIYGQHNRPSGVPSRFSGSGSGTDFTLTISSLQPEDFATYYCQQGKTLPLTFGQGTKVEIK

SEQ ID NO: 1936 - protein, 107 aa, synthetic construct
DIQMTQSPSSLSASVGDRVTITCRASQTIERRLNWYQQKPGKAPKLLIYGRNKRPSGVPSRFSGSGSGTDFTLTISSLQPEDFATYYCSQSTRVPYTFGQGTKVEIK

SEQ ID NO: 1937 - protein, 110 aa, synthetic construct; identical to SEQ ID NO: 1676

SEQ ID NO: 1938 - protein, 109 aa, synthetic construct
DIQMTQSPSSLSASVGDRVTITCSGDLRNKYASWYQQKPGKAPKLLIYGTSYRYSGVPSRFSGSGSGTDFTLTISSLQPEDFATYYCASRSSKGNPHVLFGQGTKVEIK

SEQ ID NO: 1939 - protein, 107 aa, synthetic construct
DIQMTQSPSSLSASVGDRVTITCRASQIIRRYLNWYQQKPGKAPKLLIYGQHNRPSGVPSRFSGSGSGTDFTLTISSLQPEDFATYYCSQSTRVPPTFGQGTKVEIK

SEQ ID NO: 1940 - protein, 110 aa, synthetic construct
DIQMTQSPSSLSASVGDRVTITCRASQTIERRLNWYQQKPGKAPKLLIYGRNKRPSGVPSRFSGSGSGTDFTLTISSLQPEDFATYYCSTRSRKGNPHVLFGQGTKVEIK

SEQ ID NO: 1941 - protein, 106 aa, synthetic construct; identical to SEQ ID NO: 1812

SEQ ID NO: 1942 - protein, 107 aa, synthetic construct
DIQMTQSPSSLSASVGDRVTITCRASQGVRTSLAWYQQKPGKAPKLLIYRASTLASGVPSRFSGSGSGTDFTLTISSLQPEDFATYYCQQSYRPPLTFGQGTKVEIK

SEQ ID NO: 1943 - protein, 109 aa, synthetic construct
DIQMTQSPSSLSASVGDRVTITCKASDHIGKFLTWYQQKPGKAPKLLIYGRNKRPSGVPSRFSGSGSGTDFTLTISSLQPEDFATYYCQSYDLKSLNVVFGQGTKVEIK

SEQ ID NO: 1944 - protein, 107 aa, synthetic construct
DIQMTQSPSSLSASVGDRVTITCSASQDINKYLNWYQQKPGKAPKLLIYGASRLQRGVPSRFSGSGSGTDFTLTISSLQPEDFATYYCQQGKTLPLTFGQGTKVEIK

SEQ ID NO: 1945 - protein, 106 aa, synthetic construct
DIQMTQSPSSLSASVGDRVTITCSGDNLGDKYVHWYQQKPGKAPKLLIYGKKNRPSGVPSRFSGSGSGTDFTLTISSLQPEDFATYYCSQSTHVPTFGQGTKVEIK

SEQ ID NO: 1946 - protein, 106 aa, synthetic construct
DIQMTQSPSSLSASVGDRVTITCRASQSIRRYLNWYQQKPGKAPKLLIYAASGLPSGVPSRFSGSGSGTDFTLTISSLQPEDFATYYCQQSYSTPTFGQGTKVEIK

SEQ ID NO: 1947 - protein, 107 aa, synthetic construct
DIQMTQSPSSLSASVGDRVTITCTGDKLAEKYVSWYQQKPGKAPKLLIYAASTLQRGVPSRFSGSGSGTDFTLTISSLQPEDFATYYCGQSYRYPLTFGQGTKVEIK

SEQ ID NO: 1948 - protein, 107 aa, synthetic construct
DIQMTQSPSSLSASVGDRVTITCRASQSISSYVNWYQQKPGKAPKLLIYQTSRLHSGVPSRFSGSGSGTDFTLTISSLQPEDFATYYCAQGWGRPVTFGQGTKVEIK

SEQ ID NO: 1949 - protein, 106 aa, synthetic construct
DIQMTQSPSSLSASVGDRVTITCSGGGSYGWYQQKPGKAPKLLIYGKNIRPSGVPSRFSGSGSGTDFTLTISSLQPEDFATYYCASRSSKGNPHVLFGQGTKVEIK

SEQ ID NO: 1950 - protein, 106 aa, synthetic construct; identical to SEQ ID NO: 1812

SEQ ID NO: 1951 - protein, 106 aa, synthetic construct
DIQMTQSPSSLSASVGDRVTITCRASQTIERRLNWYQQKPGKAPKLLIYENNNRPSGVPSRFSGSGSGTDFTLTISSLQPEDFATYYCQQSYSAPTFGQGTKVEIK

SEQ ID NO: 1952 - protein, 108 aa, synthetic construct
DIQMTQSPSSLSASVGDRVTITCSGDLRNKYASWYQQKPGKAPKLLIYHTSRLHSGVPSRFSGSGSGTDFTLTISSLQPEDFATYYCNSRDTSGNHRVFGQGTKVEIK

SEQ ID NO: 1953 - protein, 105 aa, synthetic construct
DIQMTQSPSSLSASVGDRVTITCRASQTISSYLNWYQQKPGKAPKLLIYKKRPSGVPSRFSGSGSGTDFTLTISSLQPEDFATYYCQSTASGTVVFGQGTKVEIK

SEQ ID NO: 1954 - protein, 106 aa, synthetic construct; identical to SEQ ID NO: 1812

SEQ ID NO: 1955 - protein, 106 aa, synthetic construct
DIQMTQSPSSLSASVGDRVTITCRPNQNIATYINWYQQKPGKAPKLLIYGKKNRPSGVPSRFSGSGSGTDFTLTISSLQPEDFATYYCQQSYSTPTFGQGTKVEIK

SEQ ID NO: 1956 - protein, 110 aa, synthetic construct
DIQMTQSPSSLSASVGDRVTITCQGASLRNYYASWYQQKPGKAPKLLIYGKKNRPSGVPSRFSGSGSGTDFTLTISSLQPEDFATYYCATRAVRGNPHVLFGQGTKVEIK

SEQ ID NO: 1957 - protein, 106 aa, synthetic construct
DIQMTQSPSSLSASVGDRVTITCSGDLRNKYASWYQQKPGKAPKLLIYGRNKRPSGVPSRFSGSGSGTDFTLTISSLQPEDFATYYCQNGHSFPLTFGQGTKVEIK

SEQ ID NO: 1958 - protein, 107 aa, synthetic construct
DIQMTQSPSSLSASVGDRVTITCSGDKLGHTYTSWYQQKPGKAPKLLIYATSNLASGVPSRFSGSGSGTDFTLTISSLQPEDFATYYCQQTYSIPYTFGQGTKVEIK

SEQ ID NO: 1959 - protein, 105 aa, synthetic construct
DIQMTQSPSSLSASVGDRVTITCSGDLGEKYVSWYQQKPGKAPKLLIYGRNKRPSGVPSRFSGSGSGTDFTLTISSLQPEDFATYYCQQSYSTPTFGQGTKVEIK

SEQ ID NO: 1960 - protein, 106 aa, synthetic construct; identical to SEQ ID NO: 1812

SEQ ID NO: 1961 - protein, 107 aa, synthetic construct
DIQMTQSPSSLSASVGDRVTITCRASQSVRSYLNWYQQKPGKAPKLLIYGQHNRPSGVPSRFSGSGSGTDFTLTISSLQPEDFATYYCQQGKTLPLTFGQGTKVEIK

SEQ ID NO: 1962 - protein, 110 aa, synthetic construct
DIQMTQSPSSLSASVGDRVTITCRASQSIRRYLNWYQQKPGKAPKLLIYDASNLQSGVPSRFSGSGSGTDFTLTISSLQPEDFATYYCVTRNRYGNPHVLFGQGTKVEIK

SEQ ID NO: 1963 - protein, 107 aa, synthetic construct
DIQMTQSPSSLSASVGDRVTITCSASQDINKYLNWYQQKPGKAPKLLIYGRNKRPSGVPSRFSGSGSGTDFTLTISSLQPEDFATYYCQQSYSSAPTFGQGTKVEIK

SEQ ID NO: 1964 - protein, 110 aa, synthetic construct
DIQMTQSPSSLSASVGDRVTITCSGDNLRGYYASWYQQKPGKAPKLLIYPKHNRPPGVPSRFSGSGSGTDFTLTISSLQPEDFATYYCSTRSSKGNPHVLFGQGTKVEIK

SEQ ID NO: 1965 - protein, 107 aa, synthetic construct; identical to SEQ ID NO: 1892

SEQ ID NO: 1966 - protein, 107 aa, synthetic construct
DIQMTQSPSSLSASVGDRVTITCRASQSIRRYLNWYQQKPGKAPKLLIYDASSSQSGVPSRFSGSGSGTDFTLTISSLQPEDFATYYCGQSYRYPLTFGQGTKVEIK

SEQ ID NO: 1967 - protein, 107 aa, synthetic construct
DIQMTQSPSSLSASVGDRVTITCRASQSISSYVNWYQQKPGKAPKLLIYGASRLQRGVPSRFSGSGSGTDFTLTISSLQPEDFATYYCQQSYSFPRTFGQGTKVEIK

SEQ ID NO: 1968 - protein, 106 aa, synthetic construct; identical to SEQ ID NO: 1812

SEQ ID NO: 1969 - protein, 110 aa, synthetic construct
DIQMTQSPSSLSASVGDRVTITCQGASLRNYYASWYQQKPGKAPKLLIYAKNNRPSGVPSRFSGSGSGTDFTLTISSLQPEDFATYYCSTRSRKGNPHVLFGQGTKVEIK

SEQ ID NO: 1970 - protein, 109 aa, synthetic construct
DIQMTQSPSSLSASVGDRVTITCSGDLRNKYASWYQQKPGKAPKLLIYHTSRLHSGVPSRFSGSGSGTDFTLTISSLQPEDFATYYCYSRDRSGNHLGMFGQGTKVEIK

SEQ ID NO: 1971 - protein, 110 aa, synthetic construct
DIQMTQSPSSLSASVGDRVTITCSGDNLRGYYASWYQQKPGKAPKLLIYGKKNRPSGVPSRFSGSGSGTDFTLTISSLQPEDFATYYCSTRSRKGNPHVLFGQGTKVEIK

SEQ ID NO: 1972 - protein, 106 aa, synthetic construct; identical to SEQ ID NO: 1812

SEQ ID NO: 1973 - protein, 110 aa, synthetic construct
DIQMTQSPSSLSASVGDRVTITCSGNKLGDKYASWYQQKPGKAPKLLIYGKKNRPSGVPSRFSGSGSGTDFTLTISSLQPEDFATYYCSTRSSKGNPHVLFGQGTKVEIK

SEQ ID NO: 1974 - protein, 107 aa, synthetic construct
DIQMTQSPSSLSASVGDRVTITCRASQSIRRYLNWYQQKPGKAPKLLIYGKNIRPSGVPSRFSGSGSGTDFTLTISSLQPEDFATYYCAQGWGRPVTFGQGTKVEIK

SEQ ID NO: 1975 - protein, 106 aa, synthetic construct
DIQMTQSPSSLSASVGDRVTITCRASQSISNNLNWYQQKPGKAPKLLIYHTSRLHSGVPSRFSGSGSGTDFTLTISSLQPEDFATYYCQQSYSTPSFGQGTKVEIK

SEQ ID NO: 1976 - protein, 106 aa, synthetic construct; identical to SEQ ID NO: 1812

SEQ ID NO: 1977 - protein, 107 aa, synthetic construct
DIQMTQSPSSLSASVGDRVTITCRASQSIRRYLNWYQQKPGKAPKLLIYQNDKRPSGVPSRFSGSGSGTDFTLTISSLQPEDFATYYCQQSYRPPLTFGQGTKVEIK

SEQ ID NO: 1978 - protein, 110 aa, synthetic construct
DIQMTQSPSSLSASVGDRVTITCQASQSISSYLAWYQQKPGKAPKLLIYHDNKRPSGVPSRFSGSGSGTDFTLTISSLQPEDFATYYCMARSRKGNPHVLFGQGTKVEIK

SEQ ID NO: 1979 - protein, 107 aa, synthetic construct
DIQMTQSPSSLSASVGDRVTITCRASQSIRRYLNWYQQKPGKAPKLLIYGASTLQSGVPSRFSGSGSGTDFTLTISSLQPEDFATYYCGQGVLWPATFGQGTKVEIK

SEQ ID NO: 1980 - protein, 110 aa, synthetic construct; identical to SEQ ID NO: 1877

SEQ ID NO: 1981 - protein, 110 aa, synthetic construct
DIQMTQSPSSLSASVGDRVTITCSGDKLGHTYTSWYQQKPGKAPKLLIYKVSNRFSGVPSRFSGSGSGTDFTLTISSLQPEDFATYYCMARSRKGNPHVLFGQGTKVEIK

SEQ ID NO: 1982 - protein, 106 aa, synthetic construct; identical to SEQ ID NO: 1812

SEQ ID NO: 1983 - protein, 106 aa, synthetic construct
DIQMTQSPSSLSASVGDRVTITCSASSSVSYMYWYQQKPGKAPKLLIYGKKNRPSGVPSRFSGSGSGTDFTLTISSLQPEDFATYYCQTWGPGIRVFGQGTKVEIK

SEQ ID NO: 1984 - protein, 110 aa, synthetic construct
DIQMTQSPSSLSASVGDRVTITCRASQSISNNLNWYQQKPGKAPKLLIYGASTLQSGVPSRFSGSGSGTDFTLTISSLQPEDFATYYCMARSRKGNPHVLFGQGTKVEIK

SEQ ID NO: 1985 - protein, 106 aa, synthetic construct; identical to SEQ ID NO: 1812

SEQ ID NO: 1986 - protein, 107 aa, synthetic construct
DIQMTQSPSSLSASVGDRVTITCRASQSVDRYFNWYQQKPGKAPKLLIYGQHNRPSGVPSRFSGSGSGTDFTLTINSLQPEDFATYYCAQGWGRPVTFGQGTKVEIK

SEQ ID NO: 1987 - protein, 109 aa, synthetic construct
DIQMTQSPSSLSASVGDRVTITCSGDLRNKYASWYQQKPGKAPKLLIYRTSWLQSGVPSRFSGSGSGTDFTLTISSLQPEDFATYYCSSRDKSGSRLVTFGQGTKVEIK

SEQ ID NO: 1988 - protein, 106 aa, synthetic construct
DIQMTQSPSSLSASVGDRVTITCSGDLRSYYVHWYQQKPGKAPKLLIYGKNIRPSGVPSRFSGSGSGTDFTLTISSLQPEDFATYYCQQSYRTPLTFGQGTKVEIK

SEQ ID NO: 1989 - protein, 107 aa, synthetic construct
DIQMTQSPSSLSASVGDRVTITCRASQSIRRYLNWYQQKPGKAPKLLIYGASRLQRGVPSRFSGSGSGTDFTLTISSLQPEDFATYYCQQGPGTPNTFGQGTKVEIK

SEQ ID NO: 1990 - protein, 107 aa, synthetic construct
DIQMTQSPSSLSASVGDRVTITCRPSQRISRYLNWYQQKPGKAPKLLIYQDFKRPSGVPSRFSGSGSGTDFTLTISSLQPEDFATYYCQQGYRFPLTFGQGTKVEIK

SEQ ID NO: 1991 - protein, 106 aa, synthetic construct; identical to SEQ ID NO: 1812

SEQ ID NO: 1992 - protein, 110 aa, synthetic construct; identical to SEQ ID NO: 1858

SEQ ID NO: 1993 - protein, 107 aa, synthetic construct
DIQMTQSPSSLSASVGDRVTITCRASQSILSYLNWYQQKPGKAPKLLIYGRNKRPSGVPSRFSGSGSGTDFTLTISSLQPEDFATYYCAQTGTHPTTFGQGTKVEIK

SEQ ID NO: 1994 - protein, 106 aa, synthetic construct
DIQMTQSPSSLSASVGDRVTITCRASQSIISYVNWYQQKPGKAPKLLIYGKKNRPSGVPSRFSGSGSGTDFTLTISSLQPEDFATYYCQQSYSAPTFGQGTKVEIK

SEQ ID NO: 1995 - protein, 109 aa, synthetic construct
DIQMTQSPSSLSASVGDRVTITCSASSSVSYMYWYQQKPGKAPKLLIYPKHNRPPGVPSRFSGSGSGTDFTLTISSLQPEDFATYYCSTRSSKGNPHVLFGQGTKVEIK

SEQ ID NO: 1996 - protein, 110 aa, synthetic construct
DIQMTQSPSSLSASVGDRVTITCRASQSISNNLNWYQQKPGKAPKLLIYGASSRATGVPSRFSGSGSGTDFTLTISSLQPEDFATYYCMARSRKGNPHVLFGQGTKVEIK

SEQ ID NO: 1997 - protein, 107 aa, synthetic construct
DIQMTQSPSSLSASVGDRVTITCRASQSISSRLNWYQQKPGKAPKLLIYRASSLQSGVPSRFSGSGSGTDFTLTISSLQPEDFATYYCQQTYSTPSSFGGGTKVEIK

SEQ ID NO: 1998 - protein, 107 aa, synthetic construct
DIQMTQSPSSLSASVGDRVTITCRASQSISRYLSWYQQKPGKAPKLLIYAGSKLQRGVPSRFSGSGSGTDFTLTISSLQPEDFATYYCQQTYSTPIAFGGGTKVEIK

SEQ ID NO: 1999 - protein, 107 aa, synthetic construct
DIQMTQSPSSLSASVGDRVTITCRASQSINNRLNWYQQKPGKAPKLLIYATSRLQSGVPSRFSGSGSGTDFTLTISSLQPEDFATYYCQQTHRTPLTFGGGTKVEIK

SEQ ID NO: 2000 - protein, 106 aa, synthetic construct
DIQMTQSPSSLSASVGDRVTITCRASQNIGRYLNWYQQKPGKAPKLLIYGASTLQRGVPSRFSGSGSGTDFTLTISSLQPEDFATYYCQQSYSAPTFGGGTKVEIK

SEQ ID NO: 2001 - protein, 107 aa, synthetic construct
DIQMTQSPSSLSASVGDRVTITCRASQSVRNYLNWYQQKPGKAPKRLIYAESSLQSGVPSRFSGSGSGTDFTLTISSLQPEDFATYYCQQSYRTPLTFGGGTKVEIK

SEQ ID NO: 2002 - protein, 107 aa, synthetic construct
DIQMTQSPSSLSASVGDRVTITCRASQNISTSLNWYQQKPGKAPKLLIYAASALQTGVPSRFSGSGSGTDFTLTISSLQPEDFATYYCQQSYLTPITFGGGTKVEIK

SEQ ID NO: 2003 - protein, 107 aa, synthetic construct
DIQMTQSPSSLSASVGDRVTITCRTSQSISTYLNWYQQKPGKAPKLLIYAASRLQNGVPSRFSGSGSGTDFTLTISSLQPEDFATYYCQQSYSVPGTFGGGTKVEIK

SEQ ID NO: 2004 - protein, 107 aa, synthetic construct
DIQMTQSPSSLSASVGDRVTITCRASHSISSHLNWYQQKPGKAPKLLIYGASRLQRGVPSRFSGSGSGTDFTLTISSLQPEDFATYYCQQNYNTPFTFGGGTKVEIK

SEQ ID NO: 2005 - protein, 107 aa, synthetic construct
DIQMTQSPSSLSASVGDRVTITCRASQSIGSYLNWYQQKPGKAPKLLIYASSTLQSRVPSRFSGSGSGTDFTLTISSLQPEDFATYYCQQSYSNPLTFGGGTKVEIK

SEQ ID NO: 2006 - protein, 107 aa, synthetic construct
DIQMTQSPSSLSASVGDRVTITCRASQNIPTYLNWYQQKPGKAPKLLIYAASNLQSGVPSRFSGSGSGTDFTLTISSLQPEDFATYYCQQSYTTPPTFGGGTKVEIK

SEQ ID NO: 2007 - protein, 107 aa, synthetic construct
DIQMTQSPSSLSASVGDRVTITCRASQNILTYLNWYQQKPGKAPKLLIYAASNLQSGVPSRFSGSGSGTDFTLTISSLQPEDFATYYCQQSYTTPPTFGGGTKVEIK

SEQ ID NO: 2008 - protein, 107 aa, synthetic construct
DIQMTQSPSSLSASVGDRVTITCRASQYISTFLNWYQQKPGKAPKLLIYAASRLQDGVPSRFSGSGSGTDFTLTISSLQPEDFATYYCQQSYGSSWTFGGGTKVEIK

SEQ ID NO: 2009 - protein, 107 aa, synthetic construct
DIQMTQSPSSLSASVGDRVTITCRASQSITSSLNWYQQKPGKAPKLLIYGASKLQRGVPSRFSGSGSGTDFTLTISSLQPEDFATYYCQQTYSPPWTFGGGTKVEIK

SEQ ID NO: 2010 - protein, 106 aa, synthetic construct
DIQMTQSPSSLSASVGDRVTITCRASQNIASYLNWYQQKPGKAPKLLIYGASRLQSGVPSRFSGSGSGTDFTLTISSLQPEDFATYYCQQSSTPRTFGGGTKVEIK

SEQ ID NO: 2011 - protein, 107 aa, synthetic construct
DIQMTQSPSSLSASVGDRVTITCRTSQSIRKYLNWYQQKPGKAPKLLIYASSRLQSGVPSRFSGSGSGTDFTLTISSLQPEDFATYYCQQNYRTPFTFGGGTKVEIK

SEQ ID NO: 2012 - protein, 107 aa, synthetic construct; identical to SEQ ID NO: 2007

SEQ ID NO: 2013 - protein, 107 aa, synthetic construct
DIQMTQSPSSLSASVGDRVTITCRSSQSISSYLNWYQQKPGKAPKLLIYGASSLRSGVPSRFSGSGSGTDFTLTISSLQPEDFATYYCQQSYITPPTFGGGTKVEIK

SEQ ID NO: 2014 - protein, 107 aa, synthetic construct
DIQMTQSPSSLSASVGDRVTITCRASQSISTYLNWYQQKPGKAPKLLIYTASRLQRGVPSRFSGSGSGTDFTLTISSLQPEDFATYYCQQSYKTPWTFGGGTKVEIK

SEQ ID NO: 2015 - protein, 107 aa, synthetic construct
DIQMTQSPSSLSASVGDRVTITCRASESISNFLNWYQQKPGKAPKLLIYGASSLRSGVPSRFSGSGSGTDFTLPISSLQPENFATYYWQQNYRLPYTFGGSTKGEIK

SEQ ID NO: 2016 - protein, 106 aa, synthetic construct
DIQMTQSPSSLSASVGDRVTITCRASQRINTYLNWYQQKPGKAPKLLIYAASRLRSGVPSRFSGSGSGTDFTLTISSLQPEDFATYYCQQSYSSLTFGGGTKVEIK

SEQ ID NO: 2017 - protein, 107 aa, synthetic construct
DIQMTQPPSSLSASVGDRVTITCRASQSISTYLSWYQQKPGKAPKLLIYGASNLKSGVPSRFSGSGSGTDFTLTISSLQPEDFATYYCQQSYTPPLTFGGGTKVEIK

SEQ ID NO: 2018 - protein, 107 aa, synthetic construct
DIQMTQSPSSLSASVGDRVTITCRASQSVSNYLNWYQQKPGKAPKLLIYGASKLQRGVPSRFSGSGSGTDFTLTISSLQPEDFATYYCQQSYKTPRTFGGGTKVEIK

SEQ ID NO: 2019 - protein, 106 aa, synthetic construct
DIQMTQSPSSLSASVGDRVTITCRASQTISKFLNWYQQKPGKAPKLLIYATSRLQSGVPSRFSGSGSGTDFTLTISSLQPEDFATYYCQQSYSTRTFGGGTKVEIK

SEQ ID NO: 2020 - protein, 107 aa, synthetic construct
DIQMTQSPSSLSASVGDRVTITCRASESISNYLNWYQQKPGKAPKLLIYRASRLQSGVPSRFSGSGSGTDFTLTISSLQPEDFATYYCQQTYITPWTFGGGTKVEIK

SEQ ID NO: 2021 - protein, 107 aa, synthetic construct
DIQMTQSPSSLSASVGDRVTITCRASQSISRYLSWYQQKPGKAPKLLIYAGSKLQRGVPSRFSGSGSGTDFTLTISSLQPEDFATYYCQQTYSTPPAFGGGTKVEIK

SEQ ID NO: 2022 - protein, 104 aa, synthetic construct
DIQMTQSPSSLSASVGDRVTITCRASRSISRYLNWYQQKPGKAPKLLIYGASRLQSGVPSRFSGSGSGTDFTLTISSLQPEDFATYYCQQSYRTFGGGTKVEIK

SEQ ID NO: 2023 - protein, 107 aa, synthetic construct; identical to SEQ ID NO: 1998

SEQ ID NO: 2024 - protein, 102 aa, synthetic construct
DIQMTQSPSSLSASVGDRVTITCRASQTISYLNWYQQKPGKAPKLLIYGASTLQTGVPSRFSGSGSGTDFTLTISSLQPEDFATYYCQHRGTFGGGTKVEIK

SEQ ID NO: 2025 - protein, 107 aa, synthetic construct
DIQMTQSPSSLSASVGDRVTITCRTSQTISTYLNWYQQKPGKAPKLLIYGASKLQRGVPSRFSGSGSGTDFTLTISSLQPEDFATYYCQQTYSSPLTFGGGTKVEIK

SEQ ID NO: 2026 - protein, 107 aa, synthetic construct
DIQMTQSPSSLSASVGDRVTITCRASQSVRSYLNWYQQKPGKAPKLLIYSASRLQSGVPSRFSGSGSGTDFTLTISSLQPEDFATYYCQQSYSTPPAFGGGTKVEIK

SEQ ID NO: 2027 - protein, 106 aa, synthetic construct
DIQMTQSPSSLSASVGDRVTITCRASQTVSSFLNWYQQKPGKAPKLLIYGASALQTGVPSRFSGSGSGTDFTLTISSLQPEDFATYYCQQSYSSITFGGGTKVEIK

SEQ ID NO: 2028 - protein, 107 aa, synthetic construct; identical to SEQ ID NO: 2018

SEQ ID NO: 2029 - protein, 107 aa, synthetic construct
DIQMTQSPSSLSASVGDRVTITCRASQSISSNLNWYQQKPGKAPKLLIYGASKLQRGVPSRFSGSGSGTDFTLTISSLQPEDFATYYCQRSYSTPRTFGGGTKVEIK

SEQ ID NO: 2030 - protein, 107 aa, synthetic construct
DIQMTQSPSSLSASVGDRVTITCRASQSISNKLNWYQQKPGKAPKLLIYAASRLQRGVPSRFSGSGSGTDFTLTISSLQPEDFATYYCQQSYSTPNTFGGGTKVEIK

SEQ ID NO: 2031 - protein, 107 aa, synthetic construct
DIQMTQSPSSLSASVGDRVTITCRASQTVSSYLNWYQQKPGKAPKLLIYGASKLQRGVPSRFSGSGSGTDFTLTISSLQPEDFATYYCQQSYKTPPTFGGGTKVEIK

SEQ ID NO: 2032 - protein, 106 aa, synthetic construct
DIQMTQSPSSLSASVGDRVTITCRASQSIIRYLNWYQQKPGKAPKLLIYGASNLQRGVPSRFSGSGSGTDFTLTISSLQPEDFATYYCQQSYSLPTFGGGTKVEIK

SEQ ID NO: 2033 - protein, 107 aa, synthetic construct
DIQMTQSPSSLSASVGDRVTITCRASQTIGSSLNWYQQKPGKAPKLLIYGASNLRSGVPSRFSGSGSGTDFTLTISSLQPEDFATYYCQQGYRTPLTFGGGTKVEIK

SEQ ID NO: 2034 - protein, 103 aa, synthetic construct
DIQMTQSPSSLSASVGDRVTITCRASQNIGGYLNWYQQKPGKAPKLLIYDASTLQRGVPSRFSGSGSGTDFTLTISSLQPEDFATYYCQQRDTFGGGTKVEIK

SEQ ID NO: 2035 - protein, 107 aa, synthetic construct
DIQMTQSPSSLSASVGDRVTITCRASQSISRSLNWYQQKPGKAPKLLIYAASRLRSGVPSRFSGSGSGTDFTLTISSLQPEDFATYYCQQSYATPRTFGGGTKVEIK

SEQ ID NO: 2036 - protein, 107 aa, synthetic construct
DIQMTQSPSSLSASVGDRVTITCRASQSISNLLHWYQQKPGKAPKLLIYRASRLQSGVPSRFSGSGSGTDFTLTISSLQPEDFATYYCQQTYTTPFTFGGGTKVEIK

SEQ ID NO: 2037 - protein, 107 aa, synthetic construct; identical to SEQ ID NO: 1998

SEQ ID NO: 2038 - protein, 107 aa, synthetic construct
DIQMTQSPSSLSASVGDRVTITCRSSQTISNYLSWYQQKPGKAPKLLIYGAASLQSGVPSRFSGSGSGTDFTLTISSLQPEDFATYYCQQSYRTPPTFGGGTKVEIK

SEQ ID NO: 2039 - protein, 107 aa, synthetic construct
DIQMTQSPSSLSASVGDRVTITCRASQSISRYLSWYQQKPGKAPKLLIYAASNLESGVPSRFSGSGSGTDFTLTISSLQPEDFATYYCQQSSSTPLTFGGGTKVEIK

SEQ ID NO: 2040 - protein, 107 aa, synthetic construct
DIQMTQSPSSLSASVGDRVTITCRASQNIGRYLNWYQQKPGKAPKLLIYAASRLRSGVPSRFSGSGSGTDSTLTISSLQPEDFATYYCQQSFSLPPTFGGGTKVEIK

SEQ ID NO: 2041 - protein, 107 aa, synthetic construct
DIQMTQSPSSLSASVGDRVTITCRASRSISRYLNWYQQKPGKAPKLLIYGASRLQSGVPSRFSGSGSGTDFTLTISSLQPEDFATYYCQQSFITPLTFGGGTKVEIK

SEQ ID NO: 2042 - protein, 107 aa, synthetic construct
DIQMTQSPSSLSASVGDRVTITCRASQSIGTYLNWYQQKPGKAPKLLIYAASRLQGGVPSRFSGSGSGTDFTLTISSLQPEDFATYYCQQSHSTPRTFGGGTKVEIK

SEQ ID NO: 2043 - protein, 107 aa, synthetic construct
DIQMTQSPSSLSASVGDRVTITCRASQNINRYLNWYQQKPGKAPKLLIYDTSSLQSGVPSRFSGSGSGTDFTLTISSLQPEDFATYYCQQSYATPFTFGGGTKVEIK

SEQ ID NO: 2044 - protein, 107 aa, synthetic construct
DIQMTQSPSSLSASVGDRVTITCRASRSISRYLNWYQQKPGKAPKLLIYGASSLQSGVPSRFSGSGSGTDFTLTISSLQPEDFATYYCQQTYRTPRTFGGGTKVEIK

SEQ ID NO: 2045 - protein, 107 aa, synthetic construct
DIQMTQSPSSLSASVGDRVTITCRASQSISRYLSWYQQKPGKAPKLLIYSTSTLQRGVPSRFSGSGSGTDFTLTISSLQPEDFTTYYCQHSYSTPNTFGGGTKVEIK

SEQ ID NO: 2046 - protein, 107 aa, synthetic construct
DIQMTQSPSSLSASVGDRVTITCRASQSIYNYLNWYQQKPGKAPKLLIYAASRLQRGVPSRFSGSGSGTDFTLTISSLQPEDFATYYCQHSYSTPITFGGGTKVEIK

SEQ ID NO: 2047 - protein, 107 aa, synthetic construct
DIQMTQSPSSLSASVGDRVTITCRASQSISTYLNWYQQKPGKAPKLLIYRASSLQSGVPSRFSGSGSGTDFTLTISSLQPEDFATYYCQQTYSTPLTFGGGTKVEIK

SEQ ID NO: 2048 - protein, 107 aa, synthetic construct
DIQMTQSPSSLSASVGDRVTITCRASQGISTYLNWYQQKPGKAPKLLIYAASNLQRGVPSRFSGSGSGTDFTLTISSLQPEDFATYYCQQSYSSLLTFGGGTKVEIK

SEQ ID NO: 2049 - protein, 107 aa, synthetic construct
DIQMTQSPSSLSASVGDRVTITCRASQTISNYLNWYQQKPGKAPKLLIYGASRSQSGVPSRFSGSGSGTDFTLTISSLQPEDFATYYCQQTYTPPWTFGGGTKVEIK

SEQ ID NO: 2050 - protein, 108 aa, synthetic construct
DIQMTQSPSSLSASVGDRVTITCRASQSISPYLNWYQQKPGKAPKLLIYAASSLHDGVPSRFSGSGSGTDFTLTISSLQPEDFATYYCQQSYQLPPLTFGGGTKVEIK

SEQ ID NO: 2051 - protein, 107 aa, synthetic construct
DIQMTQSPSSLSASVGDRVTITCRASQSVSRYLNWYQQKPGKAPKLLIYAAYRLQSGVPSRFSGSGSGTDFTLTISSLQPEDSATYYCQQSFSIPHTFGGGTKVEIK

SEQ ID NO: 2052 - protein, 108 aa, synthetic construct
DIQMTQSPSSLSASVGDRVTITCRASRSISRYLNWYQQKPGKAPKLLIYAASTLKSGVPSRFSGSGSGTDFTLTISSLQPEDFATYYCQQSYRTPPWTFGGGTKVEIK

SEQ ID NO: 2053 - protein, 106 aa, synthetic construct
DIQMTQSPSSLSASVGDRVTITCRARQSISSYLNWYQQKPGKAPKLLIYAASVLQSGVPSRFSGSGSGTDFTLTISSLQPEDFATYYCQQSYSALTFGGGTKVEIK

SEQ ID NO: 2054 - protein, 107 aa, synthetic construct; identical to SEQ ID NO: 2014

SEQ ID NO: 2055 - protein, 107 aa, synthetic construct
RIQMTQSPSSLSASVGDRVTITCRASQSINTYLHWYQQKPGKAPKLLIYATSSLRSGVPSRFSGSGSGTDFTLTISSLQPEDFATYYCQQIYNTPFTFGGGTKVEIK

SEQ ID NO: 2056 - protein, 108 aa, synthetic construct
DIQMTQSPSSLSASVGDRVTITCRASQSIRKYLNWYQQKPGKAPKLLIYAASTLHGGVPSRFSGSGSGTDFTLTISSLQPEDFATYYCQQTLPRTLWTFGGGTKVEIK

SEQ ID NO: 2057 - protein, 107 aa, synthetic construct
DIQMTQSPSSLSASVGDRVTITCRASQSIRSYLNWYQQKPGKAPKLLIYGASTLQRGVPSRFSGSGSGTDFTLTISSLQPEDFATYYCQQSYSPPRTFGGGTKVEIK

SEQ ID NO: 2058 - protein, 107 aa, synthetic construct; identical to SEQ ID NO: 1998

SEQ ID NO: 2059 - protein, 107 aa, synthetic construct; identical to SEQ ID NO: 1998

SEQ ID NO: 2060 - protein, 107 aa, synthetic construct
DIQMTQSPSSLSASVGDRVTITCRASQSISRHLNWYQQKPGKAPKLLIYAASSLQSGVPSRFSGSGSGTDFTLTISSLQPEDFATYYCQQSYKTPVTFGGGTKVEIK

SEQ ID NO: 2061 - protein, 107 aa, synthetic construct
DIQMTQSPSSLSASVGDRVTITCRASQIISTSLNWYQQKPGKAPKLLIYATSSLQNGVPSRFSGSGSGTDFTLTISSLQPEDFATYYCQQSYSKPYTFGGGTKVEIK

SEQ ID NO: 2062 - protein, 107 aa, synthetic construct
DIQMTQSPSSLSASVGDRVTITCRASQFISTYLNWYQQKPGKAPKLLIYSASRLQSGVPSRFSGSGSGTDFTLTISSLQPEDFATYYCQQSYSGPRTFGGGTKVEIK

SEQ ID NO: 2063 - protein, 106 aa, synthetic construct
DIQMTQSPSSLSASVGDRVTITCRASQSIATYLNWYQQKPGKAPKLLIYGASKLQRGVPSRFSGSGSGTDFTLTISSLQPEDFATYYCQQSYSTPTFGGGTKVEIK

SEQ ID NO: 2064 - protein, 107 aa, synthetic construct
DIQMTQSPSSLSASVGDRVTITCRASQYISTYLNWYQQKPGKAPKLLIYAASHLQSGVPSRFSGSGSGTDFTLTISSLQPEDFATYYCQQTYSTPYTFGGGTKVEIK

SEQ ID NO: 2065 - protein, 107 aa, synthetic construct
DIQMTQSPSSLSASVGDRVTITCRASQSISSYVNWYQQKPGKAPKLLIYAASNLQRGVPSRFSGSGSGTDFTLTISSLQPEDFATYYCQQSYRNPRTFGGGTKVEIK

SEQ ID NO: 2066 - protein, 107 aa, synthetic construct
DIQMTQSPSSLSASVGDRVTITCRTSQSISTYLNWYQQKPGKAPKLLIYGASKLQRGVPSRFSGSGSGTDFTLTISSLQPEDFATYYCQQTYRTPITFGGGTKVEIK

SEQ ID NO: 2067 - protein, 107 aa, synthetic construct
DIQMTQSPSSLSASVGDRVTITCRAGQSIGNYLNWYQQKPGKAPKLLIYGASRLRSGVPSRFSGSGSGTDFTLTISSLQPEDFATYYCQQSHSNPVTFGGGTKVEIK

SEQ ID NO: 2068 - protein, 107 aa, synthetic construct
DIQMTRSPSSLSASVGDRVTITCRASQSISRSLNWYQQKPGKAPKLLIYRASRLQSGVPSRFSGSGSGTDFTLTISSLQPEDFATYYCQQSFSPPLTFGGGTKVEIK

SEQ ID NO: 2069 - protein, 107 aa, synthetic construct
DIQMTQSPSSLSASVGDRVTITCRASQTISRYLNWYQQKPGKAPKLLIYAASSLSGGVPSRFSGSGSGTDFTLTISSLQPEDFATYYCQQSYTLPRTFGGGTKVEIK

SEQ ID NO: 2070 - protein, 107 aa, synthetic construct
DIQMTQSPSSLSASVGDRVTITCRASHSISRYLNWYQQKPGKAPKLLIYRASNLQTGVPSRFSGSGSGTDFTLTISSLQPEDFATYYCQQAYSSPPTFGGGTKVEIK

SEQ ID NO: 2071 - protein, 107 aa, synthetic construct
DIQMTQSPSSLSASVGDRVTITCRASQSITRHLNWYQQKPGKAPKLLIYAASRLQTGVPSRFSGSGSGTDFTLTISSLQPEDFATYYCQQTYGTPWTFGGGTKVEIK

SEQ ID NO: 2072 - protein, 107 aa, synthetic construct
DIQMTQSPSSLSASVGDRVTITCRASQGISSYLNWYQQKPGKAPKLLIYATSNLQRGVPSRFSGSGSGTDFTLTISSLQPEDFATYYCQQSYKTPLTFGGGTKVEIK

SEQ ID NO: 2073 - protein, 107 aa, synthetic construct
DIQMTQSPSSLSASVGDRVTITCRASQSVSTSLNWYQQKPGKAPKLLIYAASRLKSGVPSRFSGSGSGTDFTLTISSLQPEDFATYYCQQTFSTPFTFGGGTKVEIK

SEQ ID NO: 2074 - protein, 107 aa, synthetic construct
DIQMTQSPSSLSASVGDRVTITCRASQSIGSNLNWYQQKPGKAPKLLIYAASRLHSGVPSRFSGSGSGTDFTLTISSLQPEDFATYYCQQSYRGPRTFGGGTKVEIK

SEQ ID NO: 2075 - protein, 107 aa, synthetic construct
DIQMTQSPSSLSASVGDRVTITCRASQSVRSYLNWYQQKPGKAPKLLIYSASSLQTGVPSRFSGSGSGTDFTLTISSLQPEDFATYYCQQSYITPRTFGGGTKVEIK

SEQ ID NO: 2076 - protein, 107 aa, synthetic construct; identical to SEQ ID NO: 1998

SEQ ID NO: 2077 - protein, 107 aa, synthetic construct
DIQMTQSPSSLSASVGDRVTITCRASQSIGTYLHWYQQKPGKAPKLLIYGASKLQRGVPSRFSGSGSGTDFTLTISSLQPEDFATYYCQQSYTAPYTFGGGTKVEIK

SEQ ID NO: 2078 - protein, 107 aa, synthetic construct
DIQMTQSPSSLSASVGDRVTITCRASQSISRHLNWYQQKPGKAPKLLIYRASRLQSGVPSRFSGSGSGTDFTLTISGLQPEDFATYYCQQSYIPPLTFGGGTKVEIK

SEQ ID NO: 2079 - protein, 107 aa, synthetic construct
DIQMTQSPSSLSASVGDRVTITCRASQDIRTYLNWYQQKPGKAPKLLIYKASSLQSGVPSRFSGSGSGTDFTLTISSLQPEDFATYYCQQSYSLPRTFGGGTKVEIK

SEQ ID NO: 2080 - protein, 107 aa, synthetic construct
DIQMTQSPSSLSASVGDRVTITCRASQSISRSLSWYQQKPGKAPKLLIYAASSLASGVPSRFSGSGSGTDFTLTISSLQPEDFATYYCQQSYTPPRTFGGGTKVEIK

SEQ ID NO: 2081 - protein, 107 aa, synthetic construct; identical to SEQ ID NO: 1730

SEQ ID NO: 2082 - protein, 107 aa, synthetic construct
EIQMTQSPSSLSASVGDRVTITCRASQSISRYLNWYQQKPGKAPKLLIYAASRLQRGVPSRFSGSGSGTDFTLTISSLQPEDFATYYCQQSYTTPRTFGGGTKVEIK

SEQ ID NO: 2083 - protein, 107 aa, synthetic construct
DIQMTQSPSSLSASVGDRVTITCRASQTISKFLNWYQQKPGKAPKLLIYEASSLQSGVPSRFSGSGSGTDFTLTISSLQPEDFATYYCQQTYRTPLTFGGGTKVEIK

SEQ ID NO: 2084 - protein, 107 aa, synthetic construct
DIQMTQSPSSLSASVGDRVTITCRPSQSISTYLNWYQQKPGKAPKLLIYGASSLHSGVPSRFSGSGSGTDFTLTISSLQPEDFATYYCHQTYSTPRTFGGGTKVEIK

SEQ ID NO: 2085 - protein, 107 aa, synthetic construct; identical to SEQ ID NO: 1998

SEQ ID NO: 2086 - protein, 107 aa, synthetic construct
DIQMTQSPSSLSASVGDRVTITCRASQSIRDYLNWYQQKPGKAPKLLIYGASRLHSGVPSRFSGSGSGTDFTLTISSLQPEDFATYYCQQTYGTPRTFGGGTKVEIK

SEQ ID NO: 2087 - protein, 107 aa, synthetic construct
DIQMTQSPSSLSASVGDRVTITCRGSQSISSYLNWYQQKPGKAPKLLIYTASALQSGVPSRFSGSGSGTDFTLTISSLQPEDFATYYCQQSYSNPVTFGGGTKAEIK

SEQ ID NO: 2088 - protein, 107 aa, synthetic construct
DIQMTQSPSSLSASVGDRVTITCRASQTISTYLNWYQQKPGKAPKLLIYGTSSLQSGVPSRFSGSGSGTDFTLTISSLQPEDFATYYCQQSFSIPLTFGGGTKVEIK

SEQ ID NO: 2089 - protein, 107 aa, synthetic construct
DIQMTQSPSSLSASVGDRVTITCRASQTVSSYLNWYQQKPGKAPKLLIYRASRLQSGVPSRFSGSGSGTDFTLTISSLQPEDFATYYCQQSYTNPRTFGGGTKVEIK

SEQ ID NO: 2090 - protein, 107 aa, synthetic construct; identical to SEQ ID NO: 1998

SEQ ID NO: 2091 - protein, 107 aa, synthetic construct
DIQMTQSPSSLSASVGDRVTITCRASQSISRYLNWYQQKPGKAPKLLIYAASKLQRGVPSRFSGSGSGTDFTLTISSLQPEDFATYYCQQSYRGPRTFGGGTKVEIK

SEQ ID NO: 2092 - protein, 107 aa, synthetic construct; identical to SEQ ID NO: 1998

SEQ ID NO: 2093 - protein, 107 aa, synthetic construct; identical to SEQ ID NO: 1998

SEQ ID NO: 2094 - protein, 107 aa, synthetic construct
DIQMTQSPSSLSASVGDRVTITCRASQSISRYLSWYQQKPGKAPKLLIYAASSLESGVPSRFSGSGSGTDFTLTISSLQPEDFATYYCQQSYTLPYTFGGGTKVEIK

SEQ ID NO: 2095 - protein, 107 aa, synthetic construct
DIQMTQSPSSLSASVGDRVTITCRASQTISSYLHWYQQKPGKAPKLLIYGASSLQAGVPSRFSGSGSGTDFTLTISSLQPEDFATYYCLQSYSSPRTFGGGTKVEIK

SEQ ID NO: 2096 - protein, 107 aa, synthetic construct; identical to SEQ ID NO: 2018

SEQ ID NO: 2097 - protein, 107 aa, synthetic construct
DIQMTQSPSSLSASVGDRVTITCRASQSIGTNLNWYQQKPGKAPKLLIYGASSLYAGVPSRFSGSGSGTDFTLTISSLQPEDFATYYCQQTYSSPVTFGGGTKVEIK

SEQ ID NO: 2098 - protein, 106 aa, synthetic construct
DIQMTQSPSSLSASVGDRVTITCRASQIISRYLNWYQQKPGKAPKLLIYAASNLQNGVPSRFSGSGSGTDFTLTISSLQPEDFATYYCQQSYSSPTFGGGTKVEIK

SEQ ID NO: 2099 - protein, 107 aa, synthetic construct
DIQMTQSPSSLSASVGDRVTITCRASQNIRRYLNWYQQKPGKAPKLLIYSASSLQRGVPSRFSGSGSGTDFTLTISSLQPEDFATYYCQQSYSGPRTFGGGTKVEIK

SEQ ID NO: 2100 - protein, 107 aa, synthetic construct
DIQMTQSPSSLSASVGDRVTITCRAGQSIATYLNWYQQKPGKAPKLLIYRASRLQSGVPSRFSGSGSGTDFTLTISSLQPEDFATYYCQQSYSYPRTFGGGTKVEIK

SEQ ID NO: 2101 - protein, 107 aa, synthetic construct
DIQMTQSPSSLSASVGDRVTITCRASQTISTSLNWYQQKPGKAPKLLIYASSTLQRGIPSRFSGSGSGTDFTLTISSLQPEDFATYYCQQSYRNPRTFGGGTKVEIK

SEQ ID NO: 2102 - protein, 107 aa, synthetic construct; identical to SEQ ID NO: 1998

SEQ ID NO: 2103 - protein, 107 aa, synthetic construct; identical to SEQ ID NO: 2039

SEQ ID NO: 2104 - protein, 107 aa, synthetic construct
DIQMTQSPSSLSASVGDRVTITCRASQRINTYLNWYQQKPGKAPKLLIYGAVNLQSGVPSRFSGSGSGTDFTLTISSLQPEDFATYYCQQSFSPPLTFGGGTKVEIK

SEQ ID NO: 2105 - protein, 107 aa, synthetic construct
DIQMTQSPSSLSASVGDRVTITCRASHSISRYLNWYQQKPGKAPKLLIYAGSGLQSGVPSRFSGSGSGTDFTLTISSLQPEDFATYYCQQSFTIPYTFGGGTKVEIK

SEQ ID NO: 2106 - protein, 107 aa, synthetic construct
DIQMTQSPSSLSASVGDRVTITCRASQIISTSLNWYQQKPGKAPKLLIYRASNLQRGVPSRFSGSGSGTDFTLTISSLQPEDFATYYCQQNYITPLTFGGGTKVEIK

SEQ ID NO: 2107 - protein, 107 aa, synthetic construct
DIQMTQSPSSLSASVGDRVTITCRASQSITRHLNWYQQKPGKAPKLLIYAATSLQTGVPSRFSGSGSGTDFTLTISSLQPEDFATYYCQQSYSSPHTFGGGTKVEIK

SEQ ID NO: 2108 - protein, 107 aa, synthetic construct; identical to SEQ ID NO: 1998

SEQ ID NO: 2109 - protein, 107 aa, synthetic construct
DIQMTQSPSSLSASVGDRVTITCRASQPISSHLNWYQQKPGKAPKLLIYRASNLRSGVPSRFSGSGSGTDFTLTISSLQPEDFATYYCQQSHSTPVTFGGGTKVEIK

SEQ ID NO: 2110 - protein, 103 aa, synthetic construct
DIQMTQSPSSLSASVGDRVTITCRASQSISSSLTWYQQKPGKAPKLLIYGASSLRSGVPSRFSGSGSGTDFTLTISSLQPEDFATYYCQQSHTFGGGTKVEIK

SEQ ID NO: 2111 - protein, 107 aa, synthetic construct; identical to SEQ ID NO: 2070

SEQ ID NO: 2112 - protein, 107 aa, synthetic construct; identical to SEQ ID NO: 1998

SEQ ID NO: 2113 - protein, 107 aa, synthetic construct
DIQMTQSPSSLSASVGDRVTITCRASQNIRSYLNWYQQKPGKAPKLLIYDDIDRPSGVPSRFSGSGSGTDFTLTISSLQPEDFATYYCQTWGPGIRVFGQGTKVEIK

SEQ ID NO: 2114 - protein, 107 aa, synthetic construct
DIQMTQSPSSLSASVGDRVTITCRPSQRISRYLNWYQQKPGKAPKLLIYHTSRLQDGVPSRFSGSGSGTDFTLTISSLQPEDFATYYCQSYDKSNVVFGQGTKVEIK

SEQ ID NO: 2115 - protein, 107 aa, synthetic construct
DIQMTQSPSSLSASVGDRVTITCRASQSISSYVNWYQQKPGKAPKLLIYAKNNRPSGVPSRFSGSGSGTDFTLTISSLQPEDFATYYCQQYSGYPITFGQGTKVEIK

SEQ ID NO: 2116 - protein, 107 aa, synthetic construct
DIQMTQSPSSLSASVGDRVTITCRASQSIRRYLNWYQQKPGKAPKLLIYDASSSQSGVPSRFSGSGSGTDFTLTISSLQPEDFATYYCQQSTILPLTFGQGTKVEIK

SEQ ID NO: 2117 - protein, 107 aa, synthetic construct
DIQMTQSPSSLSASVGDRVTITCRASQTIERRLNWYQQKPGKAPKLLIYQASSLQSGVPSRFSGSGSGTDFTLTISSLQPEDFATYYCQQSYKYPLTFGQGTKVEIK

SEQ ID NO: 2118 - protein, 107 aa, synthetic construct
DIQMTQSPSSLSASVGDRVTITCRASQGVRTSLAWYQQKPGKAPKLLIYATSTLQSGVPSRFSGSGSGTDFTLTISSLQPEDFATYYCAQGLRKPKTFGQGTKVEIK

SEQ ID NO: 2119 - protein, 107 aa, synthetic construct
DIQMTQSPSSLSASVGDRVTITCRASQFIGRYFNWYQQKPGKAPKLLIYGENSRPSGVPSRFSGSGSGTDFTLTISSLQPEDFATYYCQQSHNIPLTFGQGTKVEIK

SEQ ID NO: 2120 - protein, 107 aa, synthetic construct
DIQMTQSPSSLSASVGDRVTITCRASQTIGDYLNWYQQKPGKAPKLLIYDASSSQSGVPSRFSGSGSGTDFTLTISSLQPEDFATYYCQQSYKYPLTFGQGTKVEIK

SEQ ID NO: 2121 - protein, 107 aa, synthetic construct
DIQMTQSPSSLSASVGDRVTITCKASQHVITHVTWYQQKPGKAPKLLIYDDIDRPSGVPSRFSGSGSGTDFTLTISSLQPEDFATYYCQQNNNWPTTFGQGTKVEIK

SEQ ID NO: 2122 - protein, 107 aa, synthetic construct
DIQMTQSPSSLSASVGDRVTITCQGGSPRSYYASWYQQKPGKAPKLLIYHTSRLQDGVPSRFSGSGSGTDFTLTISSLQPEDFATYYCQSYDKSNVVFGQGTKVEIK

SEQ ID NO: 2123 - protein, 107 aa, synthetic construct; identical to SEQ ID NO: 2118

SEQ ID NO: 2124 - protein, 107 aa, synthetic construct
DIQMTQSPSSLSASVGDRVTITCLASEGISSYLAWYQQKPGKAPKLLIYGENSRPSGVPSRFSGSGSGTDFTLTISSLQPEDFATYYCQQSNSWPYTFGQGTKVEIK

SEQ ID NO: 2125 - protein, 109 aa, synthetic construct
DIQMTQSPSSLSASVGDRVTITCSGHNLGDKFASWYQQKPGKAPKLLIYSASNLESGVPSRFSGSGSGTDFTLTISSLQPEDFATYYCQSYASQGIHYVFGQGTKVEIK

SEQ ID NO: 2126 - protein, 107 aa, synthetic construct
DIQMTQSPSSLSASVGDRVTITCRASQSILSYLNWYQQKPGKAPKLLIYYANYLQTGVPSRFSGSGSGTDFTLTISSLQPEDFATYYCQQSYKSPLTFGQGTKVEIK

SEQ ID NO: 2127 - protein, 108 aa, synthetic construct
DIQMTQSPSSLSASVGDRVTITCSGDKLGHTYTSWYQQKPGKAPKLLIYGKKNRPSGVPSRFSGSGSGTDFTLTISSLQPEDFATYYCQQSYSTPGITFGQGTKVEIK

SEQ ID NO: 2128 - protein, 107 aa, synthetic construct
DIQMTQSPSSLSASVGDRVTITCRASQSISGYLNWYQQKPGKAPKLLIYHTSRLQSGVPSRFSGSGSGTDFTLTISSLQPEDFATYYCQQSYSIPPTFGQGTKVEIK

SEQ ID NO: 2129 - protein, 107 aa, synthetic construct
DIQMTQSPSSLSASVGDRVTITCSGDRLGEKYVSWYQQKPGKAPKLLIYQASSLQSGVPSRFSGSGSGTDFTLTISSLQPEDFATYYCFQGSHIPYTFGQGTKVEIK

SEQ ID NO: 2130 - protein, 107 aa, synthetic construct
DIQMTQSPSSLSASVGDRVTITCSASQDINKYLNWYQQKPGKAPKLLIYHTSRLQDGVPSRFSGSGSGTDFTLTISSLQPEDFATYYCQQSYTTPWTFGQGTKVEIK

SEQ ID NO: 2131 - protein, 107 aa, synthetic construct
DIQMTQSPSSLSASVGDRVTITCRASQTIGDYLNWYQQKPGKAPKLLIYHDNKRPSGVPSRFSGSGSGTDFTLTISSLQPEDFATYYCQQWSRNPPTFGQGTKVEIK

SEQ ID NO: 2132 - protein, 107 aa, synthetic construct
DIQMTQSPSSLSASVGDRVTITCRASQFIGRYFNWYQQKPGKAPKLLIYHTSRLHSGVPSRFSGSGSGTDFTLTISSLQPEDFATYYCQAWESSTVVFGQGTKVEIK

SEQ ID NO: 2133 - protein, 106 aa, synthetic construct
DIQMTQSPSSLSASVGDRVTITCRPNQNIATYINWYQQKPGKAPKLLIYQMSHLASGVPSRFSGSGSGTDFTLTISSLQPEDFATYYCQQSYSTPSFGQGTKVEIK

SEQ ID NO: 2134 - protein, 107 aa, synthetic construct
DIQMTQSPSSLSASVGDRVTITCRASQSILSYLNWYQQKPGKAPKLLIYGSSYLQSGVPSRFSGSGSGTDFTLTISSLQPEDFATYYCQQGKTLPLTFGQGTKVEIK

SEQ ID NO: 2135 - protein, 110 aa, synthetic construct
DIQMTQSPSSLSASVGDRVTITCQGASLRNYYASWYQQKPGKAPKLLIYAASDLESGVPSRFSGSGSGTDFTLTISSLQPEDFATYYCASRSSKGNPHVLFGQGTKVEIK

SEQ ID NO: 2136 - protein, 107 aa, synthetic construct
DIQMTQSPSSLSASVGDRVTITCSGDNLRGYYASWYQQKPGKAPKLLIYQNDKRPSGVPSRFSGSGSGTDFTLTISSLQPEDFATYYCFQGSHAPLTFGQGTKVEIK

SEQ ID NO: 2137 - protein, 107 aa, synthetic construct
DIQMTQSPSSLSASVGDRVTITCRTSQDISNYLNWYQQKPGKAPKLLIYTASNLQNGVPSRFSGSGSGTDFTLTISSLQPEDFATYYCQQGIILPITFGQGTKVEIK

SEQ ID NO: 2138 - protein, 110 aa, synthetic construct
DIQMTQSPSSLSASVGDRVTITCSGDNLRGYYASWYQQKPGKAPKLLIYGTSDLQSGVPSRFSGSGSGTDFTLTISSLQPEDFATYYCYSRDRSGNHLGMFGQGTKVEIK

SEQ ID NO: 2139 - protein, 109 aa, synthetic construct
DIQMTQSPSSLSASVGDRVTITCRASENIYSNLAWYQQKPGKAPKLLIYAASDLESGVPSRFSGSGSGTDFTLTISSLQPEDFATYYCGATDLSPWSIVFDQGTKVEIK

SEQ ID NO: 2140 - protein, 107 aa, synthetic construct
DIQMTQSPSSLSASVGDRVTITCRASQSISSYVNWYQQKPGKAPKLLIYQNDKRPSGVPSRFSGSGSGTDFTLTISSLQPEDFATYYCQPSFYFPYAFGQGTKVEIK

SEQ ID NO: 2141 - protein, 107 aa, synthetic construct
DIQMTQSPSSLSASVGDRVTITCTGDKLAEKYVSWYQQKPGKAPKLLIYAKNNRPSGVPSRFSGSGSGTDFTLTISSLQPEDFATYYCQQWSSNPLTFGQGTKVEIK

SEQ ID NO: 2142 - protein, 107 aa, synthetic construct
DIQMTQSPSSLSASVGDRVTITCSASQDINKYLNWYQQKPGKAPKLLIYPKHNRPPGVPSRFSGSGSGTDFTLTISSLQPEDFATYYCQQSYFSPWTFGQGTKVEIK

SEQ ID NO: 2143 - protein, 115 aa, synthetic construct
DIQMTQSPSSLSASVGDRVTITCRSSQSIVHSVGNTFLEWYQQKPGKAPKLLIYAASNVESGVPSRFSGSGSGTDFTLTISSLQPEDFATYYCVSRAVVGNPHVLFGQGTKVEIK

SEQ ID NO: 2144 - protein, 107 aa, synthetic construct
DIQMTQSPSSLSASVGDRVTITCRASQTIGDYLNWYQQKPGKAPKLLIYTASNLQNGVPSRFSGSGSGTDFTLTISSLQPEDFATYYCQQGFSNPWTFGQGTKVEIK

SEQ ID NO: 2145 - protein, 107 aa, synthetic construct
DIQMTQSPSSLSASVGDRVTITCRASQSIRRFLNWYQQKPGKAPKLLIYQASSLQSGVPSRFSGSGSGTDFTLTISSLQPEDFATYYCQQSHSSPLTFGQGTKVEIK

SEQ ID NO: 2146 - protein, 107 aa, synthetic construct
DIQMTQSPSSLSASVGDRVTITCRASQSIVTYLNWYQQKPGKAPKLLIYHTSRLQDGVPSRFSGSGSGTDFTLTISSLQPEDFATYYCQQYSGYPITFGQGTKVEIK

SEQ ID NO: 2147 - protein, 107 aa, synthetic construct
DIQMTQSPSSLSASVGDRVTITCRASQSISSYVNWYQQKPGKAPKLLIYGSSYLQSGVPSRFSGSGSGTDFTLTISSLQPEDFATYYCQQNNNWPTTFGQGTKVEIK

SEQ ID NO: 2148 - protein, 107 aa, synthetic construct; identical to SEQ ID NO: 2142

SEQ ID NO: 2149 - protein, 106 aa, synthetic construct
DIQMTQSPSSLSASVGDRVTITCRASQTIGDYLNWYQQKPGKAPKLLIYDASNLQSGVPSRFSGSGSGTDFTLTISSLQPEDFATYYCQQSYSTPSFGQGTKVEIK

SEQ ID NO: 2150 - protein, 107 aa, synthetic construct
DIQMTQSPSSLSASVGDRVTITCRASQTIGDYLNWYQQKPGKAPKLLIYDASSLHTGVPSRFSGSGSGTDFTLTISSLQPEDFATYYCQQSYGTSWTFGQGTKVEIK

SEQ ID NO: 2151 - protein, 107 aa, synthetic construct
DIQMTQSPSSLSASVGDRVTITCRASQTIGDYLNWYQQKPGKAPKLLIYDASSSQSGVPSRFSGSGSGTDFTLTISSLQPEDFATYYCQAWDTSTAVFGQGTKVEIK

SEQ ID NO: 2152 - protein, 107 aa, synthetic construct; identical to SEQ ID NO: 2124

SEQ ID NO: 2153 - protein, 107 aa, synthetic construct
DIQMTQSPSSLSASVGDRVTITCRASQTISSYLNWYQQKPGKAPKLLIYHTSRLQSGVPSRFSGSGSGTDFTLTISSLQPEDFATYYCQQGYRWPVTFGQGTKVEIK

SEQ ID NO: 2154 - protein, 107 aa, synthetic construct
DIQMTQSPSSLSASVGDRVTITCRASQPIGPDLLWYQQKPGKAPKLLIYGRNKRPSGVPSRFSGSGSGTDFTLTISSLQPEDFATYYCSQTTHVPWTFGQGTKVEIK

SEQ ID NO: 2155 - protein, 107 aa, synthetic construct
DIQMTQSPSSLSASVGDRVTITCQASQSIYSFLSWYQQKPGKAPKLLIYHTSRLQDGVPSRFSGSGSGTDFTLTISSLQPEDFATYYCQSYDFDFAVFGQGTKVEIK

SEQ ID NO: 2156 - protein, 106 aa, synthetic construct
DIQMTQSPSSLSASVGDRVTITCRASQSILSYLNWYQQKPGKAPKLLIYGSSLQSGVPSRFSGSGSGTDFTLTISSLQPEDFATYYCQQGKTLPLTFGQGTKVEIK

SEQ ID NO: 2157 - protein, 107 aa, synthetic construct
DIKMTQSPSSLSASVGGRVTITCSGDKLGDKYAYWYQQKPGKAPKLLIYHTSRLHSGVPSRFSGSGSGTDFTLTISSLQPEDFATYYCAQGWGRPVTFGQGTKVEIK

SEQ ID NO: 2158 - protein, 109 aa, synthetic construct
DIQMTQSPSSLSASVGDRVTITCRASHNINSYLNWYQQKPGKAPKLLIYGASRLQRGVPSRFSGSGSGTDFTLTISSLQPEDFATYYCQSYDLKSLNVVFGQGTKVEIK

SEQ ID NO: 2159 - protein, 108 aa, synthetic construct
EIVLTQSPGTLSLSPGERATLSCRASQTVSRNSLAWYQQKPGQAPRLLIYGASSRATGIPDRFSGSGSGTDFTLTISSLEPEDFAVYYCQHFGNSLYTFGQGTKVEIK

SEQ ID NO: 2160 - protein, 107 aa, synthetic construct; identical to SEQ ID NO: 2118

SEQ ID NO: 2161 - protein, 107 aa, synthetic construct
DIQMTQSPSSLSASVGDRVTITCRASQSILSYLNWYQQKPGKAPKLLIYGASSLESGVPSRFSGSGSGTDFTLTISSLQPEDFATYYCQQGYRWPVTFGQGTKVEIK

SEQ ID NO: 2162 - protein, 107 aa, synthetic construct
DIQMTQSPSSLSASVGDRVTITCRANQNIGNFLNWYQQKPGKAPKLLIYTASTLQSGVPSRFSGSGSGTDFTLTISSLQPEDFATYYCAQGWGRPVTFGQGTKVEIK

SEQ ID NO: 2163 - protein, 107 aa, synthetic construct
DIQMTQSPSSLSASVGDRVTITCLASEGISSYLAWYQQKPGKAPKLLIYGENSRPSGVPSRFSGSGSGTDFTLTISSLQPEDFATYYCAQGLRKPKTFGQGTKVEIK

SEQ ID NO: 2164 - protein, 106 aa, synthetic construct
DIQMTQSPSSLSASVGDRVTITCRASQGVRTSLAWYQQKPGKAPKLLIYRTSWLQSGVPSRFSGSGSGTDFTLTISSLQPEDFATYYCLQDYNLWTFGQGTKVEIK

SEQ ID NO: 2165 - protein, 107 aa, synthetic construct
DIQMTQSPSSLSASVGDRVTITCRASQSILSYLNWYQQKPGKAPKLLIYYANSLQTGVPSRFSGSGSGTDFTLTISSLQPEDFATYYCQQGYRWPVTFGQGTKVEIK

SEQ ID NO: 2166 - protein, 107 aa, synthetic construct
DIQMTQSPSSLSASVGDRVTITCRASQDIYQNLDWYQQKPGKAPKLLIYHTSRLHSGVPSRFSGSGSGTDFTLTISSLQPEDFATYYCQQTYSIPYTFGQGTKVEIK

SEQ ID NO: 2167 - protein, 107 aa, synthetic construct; identical to SEQ ID NO: 2120

SEQ ID NO: 2168 - protein, 107 aa, synthetic construct
DIQMTQSPSSLSASVGDRVTITCRTSQDIWNYLNWYQQKPGKAPKLLIYGASSLESGVPSRFSGSGSGTDFTLTISSLQPEDFATYYCQAWDTNTVVFGQGTKVEIK

SEQ ID NO: 2169 - protein, 109 aa, synthetic construct
EIVLTQSPGTLSLSPGERATLSCRASQSVNSRYLAWYQQKPGQAPRLLIYGASSRATGIPDRFSGSGSGTDFTLTISSLEPEDFAVYYCQQYDPSTGYSFGQGTKVEIK

SEQ ID NO: 2170 - protein, 107 aa, synthetic construct; identical to SEQ ID NO: 2113

SEQ ID NO: 2171 - protein, 107 aa, synthetic construct
DIQMTQSPSSLSASVGDRVTITCRASQSISSYLHWYQQKPGKAPKLLIYWASDRESGVPSRFSGSGSGTDFTLTISSLQPEDFATYYCGQSYTFPYTFGQGTKVEIK

SEQ ID NO: 2172 - protein, 107 aa, synthetic construct
DIQMTQSPSSLSASVGDRVTITCRASQTIERRLNWYQQKPGKAPKLLIYDDIDRPSGVPSRFSGSGSGTDFTLTISSLQPEDFATYYCQQTYDTPLTFGQGTKVEIK

SEQ ID NO: 2173 - protein, 108 aa, synthetic construct
DIQMTQSPSSLSASVGDRVTITCRASQDIKNYLNWYQQKPGKAPKLLIYDASSLHTGVPSRFSGSGSGTDFTLTISSLQPEDFATYYCGFDNGGDIDVFGQGTKVEIK

SEQ ID NO: 2174 - protein, 107 aa, synthetic construct; identical to SEQ ID NO: 2124

SEQ ID NO: 2175 - protein, 107 aa, synthetic construct
DIQMTQSPSSLSASVGDRVTITCRASQSILSYLNWYQQKPGKAPKLLIYHTSRLHSGVPSRFSGSGSGTDFTLTISSLQPEDFATYYCQQGYRWPVTFGQGTKVEIK

SEQ ID NO: 2176 - protein, 107 aa, synthetic construct
DIQMTQSPSSLSASVGDRVTITCSASQDINKYLNWYQQKPGKAPKLLIYYANSLQTGVPSRFSGSGSGTDFTLTISSLQPEDFATYYCQPSFLYPYTFGQGTKVEIK

SEQ ID NO: 2177 - protein, 107 aa, synthetic construct; identical to SEQ ID NO: 2120

SEQ ID NO: 2178 - protein, 107 aa, synthetic construct; identical to SEQ ID NO: 2119

SEQ ID NO: 2179 - protein, 107 aa, synthetic construct; identical to SEQ ID NO: 2119

SEQ ID NO: 2180 - protein, 107 aa, synthetic construct
DIQMTQSPSSLSASVGDRVTITCRASQNIRSYLNWYQQKPGKAPKLLIYENNNRPSGVPSRFSGSGSGTDFTLTISSLQPEDFATYYCQNVLNTPLTFGQGTKVEIK

SEQ ID NO: 2181 - protein, 107 aa, synthetic construct; identical to SEQ ID NO: 2142

SEQ ID NO: 2182 - protein, 107 aa, synthetic construct
DIQMTQSPSSLSASVGDRVTITCRASQPIAYFLSWYQQKPGKAPKLLIYDTSKVASGVPSRFSGSGSGTDFTLTISSLQPEDFATYYCQQYQSLPLTFGQGTKVEIK

SEQ ID NO: 2183 - protein, 110 aa, synthetic construct
DIQMTQSPSSLSASVGDRVTITCQGDFLRSYYASWYQQKPGKAPKLLIYGKNIRPSGVPSRFSGSGSGTDFTLTISSLQPEDFATYYCASRSSKGNPHVLFGQGTKVEIK

SEQ ID NO: 2184 - protein, 107 aa, synthetic construct; identical to SEQ ID NO: 2118

SEQ ID NO: 2185 - protein, 107 aa, synthetic construct; identical to SEQ ID NO: 2118

SEQ ID NO: 2186 - protein, 110 aa, synthetic construct
DIQMTQSPSSLSASVGDRVTITCSGHNLGDKFASWYQQKPGKAPKLLIYGNNNRPSGVPSRFSGSGSGTDFTLTISSLQPEDFATYYCSSRDKSGSRLVTFGQGTKVEIK

SEQ ID NO: 2187 - protein, 107 aa, synthetic construct; identical to SEQ ID NO: 2118

SEQ ID NO: 2188 - protein, 106 aa, synthetic construct
DIQMTQSPSSLSASVGDRVTITCSGDLRSYYVHWYQQKPGKAPKLLIYHASQSISGVPSRFSGSGSGTDFTLTISSLQPEDFATYYCQAWGSSTVIFGQGTKVEIK

SEQ ID NO: 2189 - protein, 107 aa, synthetic construct
DIQMTQSPSSLSASVGDRVTITCRASQNIRSYLNWYQQKPGKAPKLLIYDDIDRPSGVPSRFSGSGSGTDFTLTISSLQPEDFATYYCAQGLRKPKTFGQGTKVEIK

SEQ ID NO: 2190 - protein, 107 aa, synthetic construct
DIQMTQSPSSLSASVGDRVTITCSASQDINKYLNWYQQKPGKAPKLLIYAVTSLASGVPSRFSGSGSGTDFTLTISSLQPEDFATYYCQPSFYLPYTFGQGTKVEIK

SEQ ID NO: 2191 - protein, 106 aa, synthetic construct
DIQMTQSPSSLSASVGDRVTITCSASSSVSYMYWYQQKPGKAPKLLIYHTSRLQSGVPSRFSGSGSGTDFTLTISSLQPEDFATYYCQQSYHTPQTFGQGTKVEIK

SEQ ID NO: 2192 - protein, 109 aa, synthetic construct
DIQMTQSPSSLSASVGDRVTITCRASQPIGPDLLWYQQKPGKAPKLLIYYNSERPSGVPSRFSGSGSGTDFTLTISSLQPEDFATYYCLAWDTRTSGAVFGQGTKVEIK

SEQ ID NO: 2193 - protein, 107 aa, synthetic construct
DIQMTQSPSSLSASVGDRVTITCSGDNLRGYYASWYQQKPGKAPKLLIYGTSYRYSGVPSRFSGSGSGTDFTLTISSLQPEDFATYYCQAWDTNTVVFGQGTKVEIK

SEQ ID NO: 2194 - protein, 107 aa, synthetic construct; identical to SEQ ID NO: 2120

SEQ ID NO: 2195 - protein, 107 aa, synthetic construct
DIQMTQSPSSLSASVGDRVTITCLASEGISSYLAWYQQKPGKAPKLLIYGENSRPSGVPSRFSGSGSGTDFTLTISSLQPEDFATYYCQQSYKYPLTFGQGTKVEIK

SEQ ID NO: 2196 - protein, 107 aa, synthetic construct
DIQMTQSPSSLSASVGDRVTITCRPSQRISRYLNWYQQKPGKAPKLLIYATSNLASGVPSRFSGSGSGTDFTLTISSLQPEDFATYYCQQSLRTPFTFGQGTKVEIK

SEQ ID NO: 2197 - protein, 107 aa, synthetic construct; identical to SEQ ID NO: 2124

SEQ ID NO: 2198 - protein, 109 aa, synthetic construct; identical to SEQ ID NO: 2125

SEQ ID NO: 2199 - protein, 107 aa, synthetic construct; identical to SEQ ID NO: 2118

SEQ ID NO: 2200 - protein, 107 aa, synthetic construct
DIQMTQSPSSLSASVGDRVTITCRASQFIGRYFNWYQQKPGKAPKLLIYGENSRPSGVPSRFSGSGSGTDFTLTISSLQPEDFATYYCQQSNSWPYTFGQGTKVEIK

SEQ ID NO: 2201 - protein, 106 aa, synthetic construct
DIQMTQSPSSLSASVGDRVTITCSASSSVSYMYWYQQKPGKAPKLLIYGKNIRPSGVPSRFSGSGSGTDFTLTISSLQPEDFATYYCQHSRDLTFPFGQGTKVEIK

SEQ ID NO: 2202 - protein, 107 aa, synthetic construct; identical to SEQ ID NO: 2116

SEQ ID NO: 2203 - protein, 109 aa, synthetic construct
DIQMTQSPSSLSASVGDRVTITCKASENVDTYVSWYQQKPGKAPKLLIYGTSDLQSGVPSRFSGSGSGTDFTLTISSLQPEDFATYYCSSWAGSRSGTVFGQGTKVEIK

SEQ ID NO: 2204 - protein, 107 aa, synthetic construct; identical to SEQ ID NO: 2119

SEQ ID NO: 2205 - protein, 107 aa, synthetic construct
DIQMTQSPSSLSASVGDRVTITCRASQSILSYLNWYQQKPGKAPKLLIYAASDLESGVPSRFSGSGSGTDFTLTISSLQPEDFATYYCQQGYRWPVTFGQGTKVEIK

SEQ ID NO: 2206 - protein, 107 aa, synthetic construct
DIQMTQSPSSLSASVGDRVTITCRASQSILSYLNWYQQKPGKAPKLLIYGNNNRPSGVPSRFSGSGSGTDFTLTISSLQPEDFATYYCQQGYRWPVTFGQGTKVEIK

SEQ ID NO: 2207 - protein, 107 aa, synthetic construct; identical to SEQ ID NO: 2120

SEQ ID NO: 2208 - protein, 107 aa, synthetic construct
DIQMTQSPSSLSASVGDRVTITCRASQTIERRLNWYQQKPGKAPKLLIYAASTLQRGVPSRFSGSGSGTDFTLTISSLQPEDFATYYCQQGSSLPLTFGQGTKVEIK

SEQ ID NO: 2209 - protein, 107 aa, synthetic construct
DIQMTQSPSSLSASVGDRVTITCRASQTIERRLNWYQQKPGKAPKLLIYDASSLHTGVPSRFSGSGSGTDFTLTISSLQPEDFATYYCQQSYETPLTFGQGTKVEIK

SEQ ID NO: 2210 - protein, 107 aa, synthetic construct; identical to SEQ ID NO: 2116

SEQ ID NO: 2211 - protein, 107 aa, synthetic construct
DIQMTQSPSSLSASVGDRVTITCQASQSISSYLAWYQQKPGKAPKLLIYQMSHLASGVPSRFSGSGSGTDFTLTISSLQPEDFATYYCQQSYRPPITFGQGTKVEIK

SEQ ID NO: 2212 - protein, 107 aa, synthetic construct
DIQMTQSPSSLSASVGDRVTITCRASQDVSSGVAWYQQKPGKAPKLLIYAASDLESGVPSRFSGSGSGTDFTLTISSLQPEDFATYYCQASFYFPYTFGQGTKVEIK

SEQ ID NO: 2213 - protein, 110 aa, synthetic construct
DIQMTQSPSSLSASVGDRVTITCSGDKLGDKYTSWYQQKPGKAPKLLIYSASVLQSGVPSRFSGSGSGTDFTLTISSLQPEDFATYYCHSRASSDTHVRVFGQGTKVEIK

SEQ ID NO: 2214 - protein, 107 aa, synthetic construct; identical to SEQ ID NO: 2116

SEQ ID NO: 2215 - protein, 107 aa, synthetic construct
DIQMTQSPSSLSASVGDRVTITCRASQTIERRLNWYQQKPGKAPKLLIYSASNLESGVPSRFSGSGSGTDFTLTISSLQPEDFATYYCQQSYKYPLTFGQGTKVEIK

SEQ ID NO: 2216 - protein, 107 aa, synthetic construct; identical to SEQ ID NO: 2118

SEQ ID NO: 2217 - protein, 107 aa, synthetic construct; identical to SEQ ID NO: 2116

SEQ ID NO: 2218 - protein, 109 aa, synthetic construct
DIQMTQSPSSLSASVGDRVTITCSGDKLGHTYTSWYQQKPGKAPKLLIYDDIDRPSGVPSRFSGSGSGTDFTLTISSLQPEDFATYYCQSYDNDFYGTVFGQGTKVEIK

SEQ ID NO: 2219 - protein, 107 aa, synthetic construct
DIQMTQSPSSLSASVGDRVTITCRASQPIGPDLLWYQQKPGKAPKLLIYDTSKVASGVPSRFSGSGSGTDFTLTISSLQPEDFATYYCQQDAFHPPTFGQGTKVEIK

SEQ ID NO: 2220 - protein, 107 aa, synthetic construct; identical to SEQ ID NO: 2116

SEQ ID NO: 2221 - protein, 107 aa, synthetic construct
DIQMTQSPSSLSASVGDRVTITCKASENVDTYVSWYQQKPGKAPKLLIYYANSLQTGVPSRFSGSGSGTDFTLTISSLQPEDFATYYCQAWDNGAAVFGQGTKVEIK

SEQ ID NO: 2222 - protein, 106 aa, synthetic construct
DIQMTQSPSSLSASVGDRVTITCRASQSISSYVNWYQQKPGKAPKLLIYGNNNRPSGVPSRFSGSGSGTDFTLTISSLQPEDFATYYCQQSYSTPTFGQGTKVEIK

SEQ ID NO: 2223 - protein, 107 aa, synthetic construct; identical to SEQ ID NO: 2124

SEQ ID NO: 2224 - protein, 107 aa, synthetic construct
DIQMTQSPSSLSASVGDRVTITCQASQSIYSFLSWYQQKPGKAPKLLIYHTSRLQDGVPSRFSGSGSGTDFTLTISSLQPEDFATYYCQQSYTTPWTFGQGTKVEIK

SEQ ID NO: 2225 - protein, 107 aa, synthetic construct
DIQMTQSPSSLSASVGDRVTITCRASQTIGDYLNWYQQKPGKAPKLLIYDASSSQSGVPSRFSGSGSGTDFTLTISSLQPEDFATYYCQQSHNIPLTFGQGTKVEIK

SEQ ID NO: 2226 - protein, 109 aa, synthetic construct; identical to SEQ ID NO: 2125

SEQ ID NO: 2227 - protein, 107 aa, synthetic construct; identical to SEQ ID NO: 2119

SEQ ID NO: 2228 - protein, 107 aa, synthetic construct
DIQMTQSPSSLSASVGDRVTITCRASQNIRSYLNWYQQKPGKAPKLLIYGASSRATGVPSRFSGSGSGTDFTLTISSLQPEDFATYYCQQSYELPLTFGQGTKVEIK

SEQ ID NO: 2229 - protein, 110 aa, synthetic construct; identical to SEQ ID NO: 2138

SEQ ID NO: 2230 - protein, 107 aa, synthetic construct; identical to SEQ ID NO: 2130

SEQ ID NO: 2231 - protein, 109 aa, synthetic construct; identical to SEQ ID NO: 2158

SEQ ID NO: 2232 - protein, 107 aa, synthetic construct
DIQMTQSPSSLSASVGDRVTITCRASQSILSYLNWYQQKPGKAPKLLIYRKSNRPSGVPSRFSGSGSGTDFTLTISSLQPEDFATYYCQQFAYFPATFGQGTKVEIK

SEQ ID NO: 2233 - protein, 107 aa, synthetic construct; identical to SEQ ID NO: 2118

SEQ ID NO: 2234 - protein, 107 aa, synthetic construct
DIQMTQSPSSLSASVGDRVTITCQASQPIAYFLSWYQQKPGKAPKLLIYHTSRLHSGVPSRFSGSGSGTDFTLTISSLQPEDFATYYCQQYHSYPPTFGQGTKVEIK

SEQ ID NO: 2235 - protein, 107 aa, synthetic construct; identical to SEQ ID NO: 2132

SEQ ID NO: 2236 - protein, 107 aa, synthetic construct
DIQMTQSPSSLSASVGDRVTITCRASQSIRRYLNWYQQKPGKAPKLLIYDASSSQSGVPSRFSGSGSGTDFTLTISSLQPEDFATYYCQQSYKYPLTFGQGTKVEIK

SEQ ID NO: 2237 - protein, 106 aa, synthetic construct
DIQMTQSPSSLSASVGDRVTITCSGDLGEKYVSWYQQKPGKAPKLLIYQASSLQSGVPSRFSGSGSGTDFTLTISSLQPEDFATYYCFQGSHIPYTFGQGTKVEIK

SEQ ID NO: 2238 - protein, 107 aa, synthetic construct; identical to SEQ ID NO: 2113

SEQ ID NO: 2239 - protein, 107 aa, synthetic construct
DIQMTQSPSSLSASVGDRVTITCSGDKLGHTYTSWYQQKPGKAPKLLIYGTSYRYSGVPSRFSGSGSGTDFTLTISSLQPEDFATYYCQQSYSTSWTFGQGTKVEIK

SEQ ID NO: 2240 - protein, 107 aa, synthetic construct; identical to SEQ ID NO: 2116

SEQ ID NO: 2241 - protein, 107 aa, synthetic construct
DIQMTQSPSSLSASVGDRVTITCRASQPIGPDLLWYQQKPGKAPKLLIYDDIDRPSGVPSRFSGSGSGTDFTLTISSLQPEDFATYYCQQTYSTPLTFGQGTKVEIK

SEQ ID NO: 2242 - protein, 106 aa, synthetic construct
DIQMTQSPSSLSASVGDRVTITCRASQNINYYLNWYQQKPGKAPKLLIYGASNLHSGVPSRFSGSGSGTDFTLTISSLQPEDFATYYCLQDYNLWTFGQGTKVEIK

SEQ ID NO: 2243 - protein, 108 aa, synthetic construct
DIQMTQSPSSLSASVGDRVTITCRASLSISRYLNWYQQKPGKAPKLLIYTASSLHSGVPSRFSGSGSGTDFTLTISSLQPEDFATYYCQQSYRTPPWTFGGGTKVEIK

SEQ ID NO: 2244 - protein, 107 aa, synthetic construct
DIQMTQSPSSLSASVGDRVTITCRASQSISVHLNWYQQKPGKAPKLLIYIASNLQSGVPSRFSGSGSGTDFTLTISSLQPEDFATYYCQQTYTTPYTFGGGTKVEIK

SEQ ID NO: 2245 - protein, 107 aa, synthetic construct
DIQMTQSPSSLSASVGDRVTITCRASQTIGTYLNWYQQKPGKAPKLLIYGGSRLQSGVPSRFSGSGSGTDFTLTISSLQPEDFATYYCQQSYSTPYTFGGGTKVEIK

SEQ ID NO: 2246 - protein, 106 aa, synthetic construct
DIQMTQSPSSLSASVGDRVTITCRASQRISDYLHWYQQKPGKAPKLLIYGATRLQSGVPSRFSGSGSGTDFTLTISSLQPEDFATYYCQQSHSTPTFGGGTKVEIK

SEQ ID NO: 2247 - protein, 107 aa, synthetic construct
DIQMTQSPSSLSASVGDRVTITCRASQTISTYLNWYQQKPGKAPKLLIYGASNLQNGVPSRFSGSGSGTDFTLTISSLQPEDFATYYCQQSYSLPHTFGGGTKVEIK

SEQ ID NO: 2248 - protein, 107 aa, synthetic construct
DIQMTQSPSSLSASVGDRVTITCRASQIISNYLNWYQQKPGKAPKLLIYAASRLQDGVPSRFSGSGSGTDFTLTISSLQPEDFATYYCQQSFITPLTFGGGTKVEIK

SEQ ID NO: 2249 - protein, 107 aa, synthetic construct
DIQMTQSPSSLSASVGDRVTITCRASQNIRSYLNWYQQKPGKAPKLLIYATSNLQRGVPSRFSGSGSGTDFTLTISSLQPEDFATYYCQQSYRAPYIFGGGTKVEIK

SEQ ID NO: 2250 - protein, 108 aa, synthetic construct; identical to SEQ ID NO: 2243

SEQ ID NO: 2251 - protein, 107 aa, synthetic construct
DIQMTQSPSSLSASVGDRVTITCRASQSIGIHLNWYQQKPGKAPKLLIYGASRLQSGVPSRFSGSGSGTDFTLTISSLQPEDFATYYCQQSYTTPVTFGGGTKVEIK

SEQ ID NO: 2252 - protein, 103 aa, synthetic construct
DIQMTQSPSSLSASVGDRVTITCRASQSIGYYLNWYQQKPGKAPKLLIYSATSLQSGVPSRFSGSGSGTDFTLTISSLQPEDFATYYCQHRGTFGGGTKVEIK

SEQ ID NO: 2253 - protein, 107 aa, synthetic construct
DIQMTQSPSSLSASVGDRVTITCRASQSIGNYVNWYQQKPGKAPKLLIYAASNLEDGVPSRFSGSGSGTDFTLTISSLQPEDFATYYCQQSYNTPLTFGGGTKVEIK

SEQ ID NO: 2254 - protein, 107 aa, synthetic construct
DIQMTQSPSSLSASVGDRVTITCRASQTVSTYLNWYQQKPGKAPKLLIYGAFNLQNGVPSRFSGSGSGTDFTLTISSLQPEDFATYYCQQSYTLPHTFGGGTKVEIK

SEQ ID NO: 2255 - protein, 108 aa, synthetic construct
DIQMTQSPSSLSASVGDRVTITCRASQSIRSHLNWYQQKPGKAPKLLIYRASTLQTGVPSRFSGSGSGTDFTLTISSLQPEDFATYYCQQSYSILPVTFGGGTKVEIK

SEQ ID NO: 2256 - protein, 107 aa, synthetic construct
DIQMTQSPSSLSASVGDRVTITCRASRSISTYLNWYQQKPGKAPKLLIYAASSSQSGVPSRFSGSGSGTDFTLTISSLQPEDFATYYCQQTYATPWTFGGGTKVEIK

SEQ ID NO: 2257 - protein, 107 aa, synthetic construct
DIQMTQSPSSLSASVGDRVTITCRASQSIDTNLNWYQQKPGKAPKLLIYAASNLQHGVPSRFSGSGSGTDFTLTISSLQPEDFATYYCQQSSSIPLTFGGGTKVEIK

SEQ ID NO: 2258 - protein, 108 aa, synthetic construct
DIQMTQSPSSLSASVGDRVTITCRASRSIDTYLNWYQQKPGKAPKLLIYGGSRLQSGVPSRFSGSGSGTDFTLTISSLQPEDFATYYCQQSYSTPPVTFGGGTKVEIK

SEQ ID NO: 2259 - protein, 107 aa, synthetic construct
DIQMTQSPSSLSASVGDRVTITCRASQSISTDLNWYQQKPGKAPKLLIYGVSSLQSGVPSRFSGSGSGTDFTLTISSLQPEDFATYYCQQSHSTPFTFGGGTKVEIK

SEQ ID NO: 2260 - protein, 107 aa, synthetic construct
DIQMTQSPSSLSASVGDRVTITCRTSQSISSYLNWYQQKPGKAPKLLIYAASSLQSGVPSRFSGSGSGTDFTLTISSLQPEDFATYYCQQSYNIPYTFGQGTKVEIK

SEQ ID NO: 2261 - protein, 107 aa, synthetic construct
DIQMTQSPSSLSASVGDRVTITCRASQSVSYYLNWYQQKPGKAPKLLIYGAVNLQSGVPSRFSGSGSGTDFTLTISSLQPEDFATYYCQQSHTIPYTFGQGTKVEIK

SEQ ID NO: 2262 - protein, 107 aa, synthetic construct
DIQMTQSPSSLSASVGDRVTITCRASQRISNYLHWYQQKPGKAPKLLIYAASRLHSGVPSRFSGSGSGTDFTLTISSLQPEDFATYYCQQSHTIPYTFGQGTKVEIK

SEQ ID NO: 2263 - protein, 107 aa, synthetic construct
DIQMTQSPSSLSASVGDRVTITCRTSQSISSYLNWYQQKPGKAPKLLIYAASSLQSGVPSRFSGSGSGTDFTLTISSLQPEDFATYYCQQSYNIPYTFGGGTKVEIK

SEQ ID NO: 2264 - protein, 107 aa, synthetic construct
DIQMTQSPSSLSASVGDRVTITCRASQKITSYLNWYQQKPGKAPKLLIYGATRLQSGVPSRFSGSESGTDFTLTISSLQPEDFATYYCQQSFNTPRTFGGGTKVEIK

SEQ ID NO: 2265 - protein, 108 aa, synthetic construct
DIQMTQSPSSLSASVGDRVTITCRASQNIGNYLNWYQQKPGKAPKLLIYGASRLQGGVPSRFSGSGSGTDFTLTISSLQPEDFATYYCQQSYSTPSLTFGGGTKVEIK

SEQ ID NO: 2266 - protein, 107 aa, synthetic construct; identical to SEQ ID NO: 2251

SEQ ID NO: 2267 - protein, 107 aa, synthetic construct
DIQMTQSPSSLSASVGDRVTITCRASQSITRYLNWYQQKPGKAPKLLIYATSSLQSGVPSRFSGSGSGTDFTLTISSLQPEDFATYYCQQSFSTPWTFGGGTKVEIK

SEQ ID NO: 2268 - protein, 107 aa, synthetic construct
DIQMTQSPSSLSASVGDRVTITCRASQTINTYLNWYQQKPGKAPKLLIYGAFNLQSGVPSRFSGSGSGTDFTLTISSLQPEDFATYYCQQSSITPLTFGGGTKVEIK

SEQ ID NO: 2269 - protein, 107 aa, synthetic construct
DIQMTQSPSSLSASVGDRVTITCRASQSISSYVNWYQQKPGKAPKLLIYGAFRLQSGVPSRFSGSGSGTDFTLTISSLQPEDFATYYCQQTYSSPFTFGGGTKVEIK

SEQ ID NO: 2270 - protein, 107 aa, synthetic construct
DIQMTQSPSSLSASVGDRVTITCRASQRITSYLNWYQQKPGKAPKLLIYGGSRLQSGVPSRFSGSGSGTDFTLTISSLQPEDFATYYCQQSYSSPITFGGGTKVEIK

SEQ ID NO: 2271 - protein, 107 aa, synthetic construct; identical to SEQ ID NO: 2253

SEQ ID NO: 2272 - protein, 107 aa, synthetic construct
DIQMTQSPSSLSASVGDRVTITCRASQSIRTYINWYQQKPGKAPKLLIYSASSLRSGVPSRFSGSGSGTDFALTISSLQPEDFATYYCLQTYSTPYTFGGGTKVEIK

SEQ ID NO: 2273 - protein, 107 aa, synthetic construct
DIQMTQSPSSLSASVGDRVTVTCRASQTIYSHLNWYQQKPGKAPKLLIYGASILRSGVPSRFSGSGSGTDFTLTISSLQPEDFATYYCQQTYSAPFTFGGGTKVEIK

SEQ ID NO: 2274 - protein, 107 aa, synthetic construct
DIQMTQSPSSLSASVGDRVTITCRASQSISSYVSWYQQKPGKAPKLLIYRASRLQSGVPSRFSGSGSGTDFTLTISSLQPEDFATYYCQQSYSSPWTFGGGTKVEIK

SEQ ID NO: 2275 - protein, 107 aa, synthetic construct
DIQMTQSPSSLSASVGDRVTITCRASQIINTYLNWYQQKPGKAPKLLIYAASRLQSGVPSRFSGSGSGTDFTLTISSLQPEDFATYYCQQTYITPPTFGGGTKVEIK

SEQ ID NO: 2276 - protein, 108 aa, synthetic construct; identical to SEQ ID NO: 2243

SEQ ID NO: 2277 - protein, 108 aa, synthetic construct; identical to SEQ ID NO: 2243

SEQ ID NO: 2278 - protein, 107 aa, synthetic construct
DIQMTQSPSSLSASVGDRVTITCRASQTIGEYLNWYQQKPGKAPKLLIYAASRLLSGVPSRFSGSGSGTDFTLTISSLQPEDFATYYCQQSYVTPPTFGGGTKVEIK

SEQ ID NO: 2279 - protein, 107 aa, synthetic construct
DIQMTQSPSSLSASVGDRVTITCRASQSIRTYLNWYQQKPGKAPKLLIYGASRLESGVPSRFSGSGSGTDFTLTISSLQPEDFATYYCQHSYSTRYTFGGGTKVEIK

SEQ ID NO: 2280 - protein, 106 aa, synthetic construct; identical to SEQ ID NO: 2246

SEQ ID NO: 2281 - protein, 107 aa, synthetic construct
DIQMTQSPSSLSASVGDRVTITCRASLSISRYLNWYQQKPGKAPKLLIYTASSLHSGVPSRFSGSGSGTDFTLTISSLQPEDFATYYCQQSYRIPRTFGGGTKVEIK

SEQ ID NO: 2282 - protein, 107 aa, synthetic construct
DIQMTQSPSSLSASVGDRVTITCRASQSISSYLDWYQQKPGKAPKLLIYGTSRLQNGVPSRFSGSGSGTDFTLTISSLQPEDFATYYCQQSFSSPYTFGGGTKVEIK

SEQ ID NO: 2283 - protein, 106 aa, synthetic construct
DIQMTQSPSSLSASVGDRVTITCRASQSVSIYLNWYQQKPGKAPKLLIYGASSLQGGVPSRFSGSGSGTDFTLTISSLQPEDFATYYCQQSYSDLTFGGGTKVEIK

SEQ ID NO: 2284 - protein, 106 aa, synthetic construct; identical to SEQ ID NO: 2246

SEQ ID NO: 2285 - protein, 108 aa, synthetic construct
DIQMTQSPSSLSASVGDRVTITCRASQRIGTYLNWYQQKPGKAPKLLIYAASSLHSGVPSRFSGSGSGTDFTLTISSLQPEDFATYYCQQSYQLPPRTFGGGTKVEIK

SEQ ID NO: 2286 - protein, 107 aa, synthetic construct
DIQMTQSPSSLSASVGDRVTITCRASQSINKYLNWYQQKPGKAPKLLIYGASRLESGVPSRFSGSGSGTDFTLTISSLQPEDFATYYCQQSYSTSRTFGGGTKVEIK

SEQ ID NO: 2287 - protein, 107 aa, synthetic construct
DIQMTQSPSSLSASVGDRVTITCRASESINRYLNWYQQKPGKAPKLLIYATSRLESGVPSRFSGSGSGTDFTLTISSLQPEDFATYYCQQTYSLPYTFGGGTKVEIK

SEQ ID NO: 2288 - protein, 107 aa, synthetic construct
DIQMTQSPSSMSASVGDRVTITCRASQSIFSYLNWYQQKPGKAPKLLIYSASNLQSGVPSRFSGSGSGTDFTLTISSLQPEDFATYYCQQSYRTPQTFGGGTKVEIK

SEQ ID NO: 2289 - protein, 108 aa, synthetic construct; identical to SEQ ID NO: 2243

SEQ ID NO: 2290 - protein, 107 aa, synthetic construct
DIQMTQSPSSLSASVGDRVTITCRASQIISRYLNWYQQKPGKAPKLLIYDTSNLQSGVPSRFSGSGSGTDFTLTISSLQPEDFATYYCQQSYDTPYTFGGGTKVEIK

SEQ ID NO: 2291 - protein, 107 aa, synthetic construct
DIQMTQSPSSLSASVGDRVTITCRASQSIGAYLNWYQQKPGKAPKLLIYSSSSLQSGVPSRFSGSGSGTDFTLTISSLQPEDFATYYCQQGYNTPYTFGGGTKVEIK

SEQ ID NO: 2292 - protein, 107 aa, synthetic construct
DIQMTQSPSSLSASVGDRVTITCQTSQSVSSYLNWYQQKPGKAPKLLIYAASTLASGVPSRFSGSGSGTDFTLTISSLQPEDFATYYCQQSYITPITFGGGTKVEIK

SEQ ID NO: 2293 - protein, 107 aa, synthetic construct
DIQMTQSPSSLSASVGDRVTITCRASQTIGEYLNWYQQKPGKAPKLLIYGATRLHSGVPSRFSGSGSGTDFTLTISSLQPEDFATYYCQQSFSFPLTFGGGTKVEIK

SEQ ID NO: 2294 - protein, 107 aa, synthetic construct
DIQMTQSPSSLSASVGDRVTITCRASQIIGNYLNWYQQKPGKAPKLLIYAASTLETGVPSRFSGSGSGTDFTLTISSLQPEDFATYYCQQTSSTPFTFGGGTKVEIK

SEQ ID NO: 2295 - protein, 103 aa, synthetic construct
DIQMTQSPSSLSASVGDRVTITCRTSQSISNLLHWYQQKPGKAPKLLIYAASILPSGVPSRFSGSGSGTDFTLTISSLQPEDFATYYCQHRGTFGGGTKVEIK

SEQ ID NO: 2296 - protein, 107 aa, synthetic construct
DIQMTQSPSSLSASVGDRVTITCRASQSIDTNLNWYQQKPGKAPKLLIYAVSNLQHGVPSRFSGSGSGTDFTLTISSLQPEDFATYYCQQSSSIPLTFGGGTKVEIK

SEQ ID NO: 2297 - protein, 107 aa, synthetic construct
DIQMTQSPSSLSASVGDRVTITCRASQSVSRYLNWYQQKPGKAPKLLIYATSSLQTGVPSRFSGSGSGTDFTLTISSLQPEDFATYYCQQSYRTPYTFGGGTKVEIK

SEQ ID NO: 2298 - protein, 107 aa, synthetic construct
DIQMTQSPSSLSASVGDRVTITCRASQSIRSYLNWYQQKPGKAPKLLIYTASTLQPGVPSRFSGSGSGTDFTLTISSLQPEDFATYYCLQTYSTSFTFGGGTKVEIK

SEQ ID NO: 2299 - protein, 106 aa, synthetic construct
DIQMTQSPSSLSASVGDRVTITCRASQSIRTSLNWYQQRPGKAPKLLIYGAFTLQSGVPSRFSGSGSGTDFTLTISSLQPEDFATYYCQQSYSGFTFGGGTKVEIK

SEQ ID NO: 2300 - protein, 107 aa, synthetic construct; identical to SEQ ID NO: 2247

SEQ ID NO: 2301 - protein, 106 aa, synthetic construct; identical to SEQ ID NO: 2246

SEQ ID NO: 2302 - protein, 107 aa, synthetic construct
DIQMTQSPSSLSASVGDRVTITCRTSQGIRSHLNWYQQKPGKAPKLLIYAATRLQSGVPSRFSGSGSGTDFTLTISSLQPEDFATYYCQQTYSPPPDFGGGTKVEIK

SEQ ID NO: 2303 - protein, 107 aa, synthetic construct
DIQMTQSPSSLSASVGDRVTITCRASQDISTYLNWYQQKPGKAPKLLIYGASSLLSGVPSRFSGSGSGTDFTLTISSLQPEDFATYYCHQSYSVPYTFGGGTKVEIK

SEQ ID NO: 2304 - protein, 107 aa, synthetic construct; identical to SEQ ID NO: 2257

SEQ ID NO: 2305 - protein, 107 aa, synthetic construct
DIQMTQSPSSLSASVGDRVTITCRASQRIGTYLNWYQQKPGKAPKLLIYGASSLRSGVPSRFSGSGSGTDFTLTISSLQPEDFATYYCQQSYSGPRTFGGGTKVEIK

SEQ ID NO: 2306 - protein, 107 aa, synthetic construct; identical to SEQ ID NO: 2245

SEQ ID NO: 2307 - protein, 108 aa, synthetic construct; identical to SEQ ID NO: 2243

SEQ ID NO: 2308 - protein, 107 aa, synthetic construct
DIQMTQSPSSMSASVGDRVTITCRASESIGIYLNWYQQKPGKAPKLLIYDASNLQSGVPSRFSGSGSGTDFTLTISSLQPEDFATYYCQQSYSVPLTFGGGTKVEIK

SEQ ID NO: 2309 - protein, 108 aa, synthetic construct; identical to SEQ ID NO: 2243

SEQ ID NO: 2310 - protein, 107 aa, synthetic construct
DIQMTQSPSSLSASVGDRVTITCRPSQSISRYLNWYQQKPGKAPKLLIYGATRLQSGVPSRFSGSGSGTDFTLTISSLQPEDFATYYCQQSYTTPLTFGGGTKVEIK

SEQ ID NO: 2311 - protein, 107 aa, synthetic construct
DIQMTQSPSSLSASVGDRVTITCRASQSIGSNLNWYQQKPGKAPKLLIYSASSLQGGVPSRFSGSGSGTDFTLTISSLQPEDFATYYCQQSYSPLWTFGGGTKVEIK

SEQ ID NO: 2312 - protein, 107 aa, synthetic construct
DIQMTQSPSSLSASVGDRVTITCRASQTIYSYLNWYQQKPGKAPKLQIYAASILQSGVPSRFSGSGSGTDFTLTISSLQPEDFATYYCQQSFSLPPTFGGGTKVEIK

SEQ ID NO: 2313 - protein, 107 aa, synthetic construct; identical to SEQ ID NO: 2244

SEQ ID NO: 2314 - protein, 107 aa, synthetic construct
DIQMTQSPSSLSASVGDRVTITCRASQSISRSLSWYQQKPGKAPKLLIYGASNLQSGVPSRFSGSGSGTDFTLTISSLQPEDFATYYCQQSYSPPLTFGGGTKVEIK

SEQ ID NO: 2315 - protein, 107 aa, synthetic construct
DIQMTQSPSSLSASVGDRVTITCRASQSIGTYLNWYQQKPGKAPKLLIYTASKLHSGVPSRFSGSGSGTDFTLTISSLQPEDFATYYCQQSYTTPRSFGGGTKVEIK

SEQ ID NO: 2316 - protein, 108 aa, synthetic construct
DIQMTQSPSSLSASVGDRVTITCRASRSISTYLNWYQQKPGKAPKLLIYAASSSQSGVPSRFSGSGSGTDFTLTISSLQPEDFATYYCQQSYRTPPWTFGGGTKVEIK

SEQ ID NO: 2317 - protein, 107 aa, synthetic construct
DIQMTQSPSSLSASVGDRVTITCRASQNIVRYLNWYQQKPGKAPKLLIYRASTLRSGVPSRFSGSGSGTDFTLTISSLQPEDFATYYCQQSYSAPITFGGGTKVEIK

SEQ ID NO: 2318 - protein, 107 aa, synthetic construct
DIQMTQSPSSLSASVGDRVTITCRASQSVSYYLNWYQQKPGKAPKLLIYGAVNLQSGVPSRFSGSGSGTDFTLTISSLQPEDFATYYCQQSHTIPYTFGGGTKVEIK

SEQ ID NO: 2319 - protein, 107 aa, synthetic construct
DIQMTQSPSSLSASVGDRVTITCRTSQSISTYLNWYQQKPGKAPKLLIYAASRLRSGVPSRFSGSGSGTDFTLTISSLQPEDFATYYCQQSYETPLTFGGGTKVEIK

SEQ ID NO: 2320 - protein, 107 aa, synthetic construct; identical to SEQ ID NO: 2318

SEQ ID NO: 2321 - protein, 107 aa, synthetic construct
DIQMTQSPSSLSASVGDRVTITCRASQSVSSYLSWYQQKPGKAPKLLIYDTSNLQSGVPSRFSGSGSGTDFTLTISSLQPEDFATYYCQRSYSTPRTFGGGTKVEIK

SEQ ID NO: 2322 - protein, 107 aa, synthetic construct; identical to SEQ ID NO: 2244

SEQ ID NO: 2323 - protein, 107 aa, synthetic construct
DIQMTQSPSSLSASVGDRVTITCRASQSVSRYLNWYQQKPGKAPKLLIYDASSLESGVPSRFSGSGSGTDFTLTISSLQPEDFATYYCQQSYSTPTTFGGGTKVEIK

SEQ ID NO: 2324 - protein, 107 aa, synthetic construct
DIQMTQSPSSLSASVGDRVTITCRASQSVSSYLNWYQQKPGKAPKLLIYGTSRLQTGVPSRFSGSGSGTDFTLTISSLQPEDFATYYCQQSSSTPYTFGGGTKVEIK

SEQ ID NO: 2325 - protein, 107 aa, synthetic construct; identical to SEQ ID NO: 2318

SEQ ID NO: 2326 - protein, 107 aa, synthetic construct; identical to SEQ ID NO: 2245

SEQ ID NO: 2327 - protein, 108 aa, synthetic construct; identical to SEQ ID NO: 2243

SEQ ID NO: 2328 - protein, 107 aa, synthetic construct
DIQMTQSPSSLSASVGDRVTITCRASQNINRYLNWYQQKPGKAPKLLIYGASHLQSGVPSRFSGSGSGTDFALTISSLQPEDFATYYCQQTYRTPITFGGGTKVEIK

SEQ ID NO: 2329 - protein, 107 aa, synthetic construct
DIQMTQSPSSLSASVGDRVTITCRASQSIRSYLNWYQQKPGKAPKLLIYTASTLQRGVPSRFSGSGSGTDFTLTISSLQPEDFATYYCQQSSITPLTFGGGTKVEIK

SEQ ID NO: 2330 - protein, 107 aa, synthetic construct
DIQMTQSPSSLSASVGDRVTITCRASQSVSYYLNWYQQKPGKAPKLLIYGAVNLQSGVPSRFSGSGSGTDFTLTISSLQPEDFATYYCQQSFSTPWTFGGGTKVEIK

SEQ ID NO: 2331 - protein, 107 aa, synthetic construct
DIQMTQSPSSLSASVGDRVTITCRPSQSISRYLNWYQQKPGKAPKLLIYGISNLQSGVPSRFSGSGSGTDFTLTISSLQPEDFATYYCQQGYNTPYTFGGGTKVEIK

SEQ ID NO: 2332 - protein, 107 aa, synthetic construct; identical to SEQ ID NO: 2257

SEQ ID NO: 2333 - protein, 107 aa, synthetic construct; identical to SEQ ID NO: 2257

SEQ ID NO: 2334 - protein, 107 aa, synthetic construct; identical to SEQ ID NO: 2247

SEQ ID NO: 2335 - protein, 107 aa, synthetic construct
DIQMTQSPSSLSASVGDRVTITCRASQSIGNYVNWYQQKPGKAPKLLIYTASTLQTGVPSRFSGSGSGTDFTLTISSLQPEDFATYYCQQSYGTPLTFGGGTKVEIK

SEQ ID NO: 2336 - protein, 107 aa, synthetic construct; identical to SEQ ID NO: 2247

SEQ ID NO: 2337 - protein, 103 aa, synthetic construct; identical to SEQ ID NO: 2252

SEQ ID NO: 2338 - protein, 106 aa, synthetic construct; identical to SEQ ID NO: 2246

SEQ ID NO: 2339 - protein, 106 aa, synthetic construct; identical to SEQ ID NO: 2246

SEQ ID NO: 2340 - protein, 107 aa, synthetic construct
DIQMTQSPSSLSASVGDRVTITCRASETISNYLNWYQQKPGKAPKLLIYRASRLQSGVPSRFSGSGSGTDFTLTISSLQPEDFATYYCQQSFTTPWTFGGGTKVEIK

SEQ ID NO: 2341 - protein, 107 aa, synthetic construct
DIQMTQSPSSLSASVGDRVTITCRASQSITNYLNWYQQKPGKAPKLLIYRASTLQTGVPSRFSGSGSGTDFTLTISSLQPEDFATYYCQQTYSIPWTFGGGTKVEIK

SEQ ID NO: 2342 - protein, 107 aa, synthetic construct
DIQMTQSPSSLSASVGDRVTITCRASQSISSYLNWYQQKPGKAPKLLIYSASKLQSGVPSRFSGSGSGTDFTLTISSLQPEDFATYYCQQSYSTPFTFGGGTKVEIK

SEQ ID NO: 2343 - protein, 108 aa, synthetic construct; identical to SEQ ID NO: 2243

SEQ ID NO: 2344 - protein, 103 aa, synthetic construct; identical to SEQ ID NO: 2252

SEQ ID NO: 2345 - protein, 107 aa, synthetic construct
DIQITQSPSSLSASVGDRVTITCQASQSISKSLNWYQQKPGKAPKLLIYGASTLLSGVPSRFSGSGSGTDFTLTISSLQPEDFATYYCQQSFRTPLTFGGGTKVEIK

SEQ ID NO: 2346 - protein, 107 aa, synthetic construct
DIQMTQSPSSLSASVGDRVTITCRASQIIGTYLNWYQQKPGKAPKLLIYSASSLHTGVPSRFSGSGSGTDFTLTISSLQPEDFATYYCQQTYRIPYTFGGGTKVEIK

SEQ ID NO: 2347 - protein, 106 aa, synthetic construct; identical to SEQ ID NO: 2246

SEQ ID NO: 2348 - protein, 108 aa, synthetic construct; identical to SEQ ID NO: 2243

SEQ ID NO: 2349 - protein, 107 aa, synthetic construct; identical to SEQ ID NO: 2257

SEQ ID NO: 2350 - protein, 107 aa, synthetic construct; identical to SEQ ID NO: 2247

SEQ ID NO: 2351 - protein, 107 aa, synthetic construct
DIQMTQSPSSLSASVGDRVTITCRASQSISRYLSWYQQKPGKAPKLLIYGATSLHSGVPSRFSGSGSGTDFTLTISSLQPEDFATYYCQQTYSLPLTFGGGTKVEIK

SEQ ID NO: 2352 - protein, 108 aa, synthetic construct; identical to SEQ ID NO: 2243

SEQ ID NO: 2353 - protein, 107 aa, synthetic construct
DIQMTQSPSSLSASVGDRVTITCRASRRISTYLNWYQQKPGKAPKLLIYGASNLHSGVPSRFSGSGSGTDFTLTISSLQPEDFATYYCQQSFSTPYTFGGGTKVEIK

SEQ ID NO: 2354 - protein, 107 aa, synthetic construct; identical to SEQ ID NO: 2251

SEQ ID NO: 2355 - protein, 107 aa, synthetic construct; identical to SEQ ID NO: 2247

SEQ ID NO: 2356 - protein, 106 aa, synthetic construct; identical to SEQ ID NO: 2246

SEQ ID NO: 2357 - protein, 107 aa, synthetic construct
DIQMTQSPSSLSASVGDRVTITCRASQSIGIYLNWYQQKPGKAPKLLIYGVSSLHSGVPSRFSGSGSGTDFTLTISSLQPEDFATYYCQQTYSTPFTFGGGTKVEIK

SEQ ID NO: 2358 - protein, 107 aa, synthetic construct
DIQMTQSPSSLSASVGDRVTITCRASQPIGPDLLWYQQKPGKAPKLLIYDNTNRPSGVPSRFSGSGSGTDFTLTISSLQPEDFATYYCQQSQAAPLTFGQGTKVEIK

SEQ ID NO: 2359 - protein, 107 aa, synthetic construct
DIQMTQSPSSLSASVGDRVTITCRASQDVSSGVAWYQQKPGKAPKLLIYEDTKRPSGVPSRFSGSGSGTDFTLTISSLQPEDFATYYCQQTYSPPLTFGQGTKVEIK

SEQ ID NO: 2360 - protein, 107 aa, synthetic construct
DIQMTQSPSSLSASVGDRVTITCRASQDVSSGVAWYQQKPGKAPKLLIYQMSHLASGVPSRFSGSGSGTDFTLTISSLQPEDFATYYCSSQDTVTRVLGQGTKVEIK

SEQ ID NO: 2361 - protein, 110 aa, synthetic construct
DIQMTQSPSSLSASVGDRVTITCRASQDISNYLNWYQQKPGKAPKLLIYGKKNRPSGVPSRFSGSGSGTDFTLTISSLQPEDFATYYCQQGYTRTDIDNTFGQGTKVEIK

SEQ ID NO: 2362 - protein, 107 aa, synthetic construct
DIQMTQSPSSLSASVGDRVTITCRASQDVSSGVAWYQQKPGKAPKLLIYGKKNRPSGVPSRFSGSGSGTDFTLTISSLQPEDFATYYCQAWDRDTGVFGQGTKVEIK

SEQ ID NO: 2363 - protein, 106 aa, synthetic construct
DIQMTQSPSSLSASVGDRVTITCRASQDVSSGVAWYQQKPGKAPKLLIYATSTLQSGVPSRFSGSGSGTDFTLTISSLQPEDFATYYCQQSFSVPAFGQGTKVEIK

SEQ ID NO: 2364 - protein, 107 aa, synthetic construct
DIQMTQSPSSLSASVGDRVTITCRTSQDISNYLNWYQQKPGKAPKLLIYATSNLASGVPSRFSGSGSGTDFTLTISSLQPEDFATYYCQQSYSSAPMFGQGTKVEIK

SEQ ID NO: 2365 - protein, 107 aa, synthetic construct
DIQMTQSPSSLSASVGDRVTITCSGDRLGEKYVSWYQQKPGKAPKLLIYQDFKRPSGVPSRFSGSGSGTDFTLTISSLQPEDFATYYCQQPWRSPGTFGQGTKVEIK

SEQ ID NO: 2366 - protein, 105 aa, synthetic construct
DIQMTQSPSSLSASVGDRVTITCRASSSVSYMHWYQQKPGKAPKLLIYAASDLESGVPSRFSGSGSGTDFTLTISSLQPEDFATYYCSQSTHVPTFGQGTKVEIK

SEQ ID NO: 2367 - protein, 107 aa, synthetic construct
DIQMTQSPSSLSASVGDRVTITCRTSQDISNYLNWYQQKPGKAPKLLIYGASTLQSGVPSRFSGSGSGTDFTLTISSLQPEDFATYYCQQSYDNPLTFGQGTKVEIK

SEQ ID NO: 2368 - protein, 106 aa, synthetic construct
DIQMTQSPSSLSASVGDRVTITCRASQSIISYVNWYQQKPGKAPKLLIYGASNLHSGVPSRFSGSGSGTDFTLTISSLQPEDFATYYCQQSYSTPTFGQGTKVEIK

SEQ ID NO: 2369 - protein, 111 aa, synthetic construct
DIQMTQSPSSLSASVGDRVTITCRASESVEYHGTSLMHWYQQKPGKAPKLLIYGTSNLESGVPSRFSGSGSGTDFTLTISSLQPEDFATYYCQQVVWRPFTFGQGTKVEIK

SEQ ID NO: 2370 - protein, 108 aa, synthetic construct
DIQMTQSPSSLSASVGDRVTITCSGDNLGDKYVHWYQQKPGKAPKLLIYGKNIRPSGVPSRFSGSGSGTDFTLTISSLQPEDFATYYCQSGSSSANAVFGQGTKVEIK

SEQ ID NO: 2371 - protein, 107 aa, synthetic construct
DIQMTQSPSSLSASVGDRVTITCSGDKLGDKYAYWYQQKPGKAPKLLIYFTSTLAAGVPSRFSGSGSGTDFTLTISSLQPEDFATYYCQQSYSSAPTFGQGTKVEIK

SEQ ID NO: 2372 - protein, 107 aa, synthetic construct; identical to SEQ ID NO: 2360

SEQ ID NO: 2373 - protein, 106 aa, synthetic construct
DIQMTQSPSSLSASVGDRVTITCRASSSVSYMHWYQQKPGKAPKLLIYQNDKRPSGVPSRFSGSGSGTDFTLTISSLQPEDFATYYCQQHYSPSHTFGQGTKVEIK

SEQ ID NO: 2374 - protein, 107 aa, synthetic construct
DIQMTQSPSSLSASVGDRVTITCKASQHVITHVTWYQQKPGKAPKLLIYGTSDLQSGVPSRFSGSGSGTDFTLTISSLQPEDFATYYCQQSNSWPYTFGQGTKVEIK

SEQ ID NO: 2375 - protein, 109 aa, synthetic construct; identical to SEQ ID NO: 1869

SEQ ID NO: 2376 - protein, 111 aa, synthetic construct
DIQMTQSPSSLSASVGDRVTITCRASESVEYHGTSLMHWYQQKPGKAPKLLIYGRNKRPSGVPSRFSGSGSGTDFTLTISSLQPEDFATYYCQAWDRDTGVFGQGTKVEIK

SEQ ID NO: 2377 - protein, 107 aa, synthetic construct
DIQMTQSPSSLSASVGDRVTITCRASQTIGDYLNWYQQKPGKAPKLLIYDASNLQSGVPSRFSGSGSGTDFTLTISSLQPEDFATYYCQQSYELPLTFGQGTKVEIK

SEQ ID NO: 2378 - protein, 107 aa, synthetic construct
DIQMTQSPSSLSASVGDRVTITCRTSQDIGNYLNWYQQKPGKAPKLLIYGENSRPSGVPSRFSGSGSGTDFTLTISSLQPEDFATYYCQQSYSFPLTFGQGTKVEIK

SEQ ID NO: 2379 - protein, 107 aa, synthetic construct
DIQMTQSPSSLSASVGDRVTITCRASQDVSSGVAWYQQKPGKAPKLLIYDASNLQSGVPSRFSGSGSGTDFTLTISSLQPEDFATYYCSQSTRVPPTFGQGTKVEIK

SEQ ID NO: 2380 - protein, 107 aa, synthetic construct
DIQMTQSPSSLSASVGDRVTITCRASQPIVRNLRWYQQKPGKAPKLLIYGASSLESGVPSRFSGSGSGTDFTLTISSLQPEDFATYYCLQNVANPATFGQGTKVEIK

SEQ ID NO: 2381 - protein, 109 aa, synthetic construct
DIQMTQSPSSLSASVGDRVTITCRASQSILSYLNWYQQKPGKAPKLLIYGTSKLASGVPSRFSGSGSGTDFTLTISSLQPEDFATYYCQSYDNDFYGTVFGQGTKVEIK

SEQ ID NO: 2382 - protein, 107 aa, synthetic construct
DIQMTQSPSSLSASVGDRVTITCRASQSILSYLNWYQQKPGKAPKLLIYGASSLESGVPSRFSGSGSGTDFTLTISSLQPEDFATYYCQQTYDTPLTFGQGTKVEIK

SEQ ID NO: 2383 - protein, 107 aa, synthetic construct
DIQMTQSPSSLSASVGDRVTITCRASQSIVTYLNWYQQKPGKAPNLLIYHTSRLQSGVPSRFSGSGSGTDFTLTISSLQPEDFATYYCQQGPGTPNTFGQGTKVEIK

SEQ ID NO: 2384 - protein, 106 aa, synthetic construct
DIQMTQSPSSLSASVGDRVTITCSGDNLGDKYVHWYQQKPGKAPKLLIYGKKNRPSGVPSRFSGSGSGTDFTLTISSLQPEDFATYYCQAWDRTVVFGQGTKVEIK

SEQ ID NO: 2385 - protein, 107 aa, synthetic construct
DIQMTQSPSSLSASVGDRVTITCTGDKLAEKYVSWYQQKPGKAPKLLIYQNDKRPSGVPSRFSGSGSGTDFTLTISSLQPEDFATYYCQQSYSRPYTFGQGTKVEIK

SEQ ID NO: 2386 - protein, 107 aa, synthetic construct
DIQMTQSPSSLSASVGDRVTITCRASQSISSYVNWYQQKPGKAPKLLIYGKNIRPSGVPSRFSGSGSGTDFTLTISSLQPEDFATYYCQHSRDLTFPFGQGTKVEIK

SEQ ID NO: 2387 - protein, 112 aa, synthetic construct
DIQMTQSPSSLSASVGDRVTITCRASQTIERRLNWYQQKPGKAPKLLIYGTTSLESGVPSRFSGSGSGTDFTLTISSLQPEDFATYYCHHWHHNPTHHETNVFGQGTKVEIK

SEQ ID NO: 2388 - protein, 107 aa, synthetic construct
DIQMTQSPSSLSASVGDRVTITCRASQGVRTSLAWYQQKPGKAPKLLIYENNNRPSGVPSRFSGSGSGTDFTLTISSLQPEDFATYYCSQSTHVPPTFGQGTKVEIK

SEQ ID NO: 2389 - protein, 106 aa, synthetic construct
DIQMTQSPSSLSASVGDRVTITCRASSSVSYMHWYQQKPGKAPKLLIYHTSRLQSGVPSRFSGSGSGTDFTLTISSLQPEDFATYYCSAFTHNSDVFGQGTKVEIK

SEQ ID NO: 2390 - protein, 107 aa, synthetic construct
DIQMTQSPSSLSASVGDRVTITCRASQDVSSGVAWYQQKPGKAPKLLIYGKKNRPSGVPSRFSGSGSGTDFTLTISSLQPEDFATYYCHQYESPPLKFGQGTKVEIK

SEQ ID NO: 2391 - protein, 107 aa, synthetic construct
DIQMTQSPSSLSASVGDRVTITCSGDTLGGKYAWWYQQKPGKAPKLLIYDNTNRPSGVPSRFSGSGSGTDFTLTISSLQPEDFATYYCQAWDNSAVIFGQGTKVEIK

SEQ ID NO: 2392 - protein, 107 aa, synthetic construct
DIQMTQSPSSLSASVGDRVTITCRASQDIKNYLNWYQQKPGKAPKLLIYPKHNRPPGVPSRFSGSGSGTDFTLTISSLQPEDFATYYCQNGHSFPLTFGQGTKVEIK

SEQ ID NO: 2393 - protein, 107 aa, synthetic construct
DIQMTQSPSSLSASVGDRVTITCSGNKLGDKYASWYQQKPGKAPKLLIYDTSKVASGVPSRFSGSGSGTDFTLTISSLQPEDFATYYCQQSYETPLTFGQGTKVEIK

SEQ ID NO: 2394 - protein, 107 aa, synthetic construct
DIQMTQSPSSLSASVGDRVTITCRTSQDISNYLNWYQQKPGKAPKLLIYGASSRATGVPSRFSGSGSGTDFTLTISSLQPEDFATYYCQQSYSNLWTFGQGTKVEIK

SEQ ID NO: 2395 - protein, 110 aa, synthetic construct
DIQMTQSPSSLSASVGDRVTITCSGDNLRDYIVHWYQQKPGKAPKLLIYETSKLASGVPSRFSGSGSGTDFTLTISSLQPEDFATYYCQQGYNSNDVDNVFGQGTKVEIK

SEQ ID NO: 2396 - protein, 107 aa, synthetic construct
DIQMTQSPSSLSASVGDRVTITCRASQNINYYLNWYQQKPGKAPKLLIYQNDKRPSGVPSRFSGSGSGTDFTLTISSLQPEDFATYYCQQSYENPLTFGQGTKVEIK

SEQ ID NO: 2397 - protein, 110 aa, synthetic construct
DIQMTQSPSSLSASVGDRVTITCSGDNIGSIYASWYQQKPGKAPKLLIYQNDKRPSGVPSRFSGSGSGTDFTLTISSLQPEDFATYYCQQGYNSNDVDNVFGQGTKVEIK

SEQ ID NO: 2398 - protein, 107 aa, synthetic construct
DIQMTQSPSSLSASVGDRVTITCRASQGVRTSLAWYQQKPGKAPKLLIYPKHNRPPGVPSRFSGSGSGTDFTLTISSLQPEDFATYYCQQYHSYPPTFGQGTKVEIK

SEQ ID NO: 2399 - protein, 107 aa, synthetic construct
DIQMTQSPSSLSASVGDRVTITCRTSQDIGNYLNWYQQKPGKAPKLLIYYDVNRPSGVPSRFSGSGSGTDFTLTISSLQPEDFATYYCQPSFYFPYTFGQGTKVEIK

SEQ ID NO: 2400 - protein, 107 aa, synthetic construct
DIQMTQSPSSLSASVGDRVTITCRASQSVDRYFNWYQQKPGKAPKLLIYDTSKVASGVPSRFSGSGSGTDFTLTISSLQPEDFATYYCQQYGSSPLTFGQGTKVEIK

SEQ ID NO: 2401 - protein, 110 aa, synthetic construct
DIQMTQSPSSLSASVGDRVTITCSGDNLGDKYVHWYQQKPGKAPKLLIYGASSRATGVPSRFSGSGSGTDFTLTISSLQPEDFATYYCTTRSTQGNPHVLFGQGTKVEIK

SEQ ID NO: 2402 - protein, 106 aa, synthetic construct
DIQMTQSPSSLSASVGDRVTITCRASSSVSYMHWYQQKPGKAPKLLIYGASNLHSGVPSRFSGSGSGTDFTLTISSLQPEDFATYYCQAWDRDTGVFGQGTKVEIK

SEQ ID NO: 2403 - protein, 107 aa, synthetic construct
DIQMTQSPSSLSASVGDRVTITCSGDNLRGYYASWYQQKPGKAPKLLIYGTSDLQSGVPSRFSGSGSGTDFTLTISSLQPEDFATYYCQAWDTNTVIFGQGTKVEIK

SEQ ID NO: 2404 - protein, 107 aa, synthetic construct
DIQMTQSPSSLSASVGDRVTITCRASQDIYQNLDWYQQKPGKAPKLLIYQDFKRPSGVPSRFSGSGSGTDFTLTISSLQPEDFATYYCQAWDNGAAVFGQGTKVEIK

SEQ ID NO: 2405 - protein, 110 aa, synthetic construct
DIQMTQSPSSLSASVGDRVTITCRASQSISSYVNWYQQKPGKAPKLLIYANTNGPSGVPSRFSGSGSGTDFTLTISSLQPEDFATYYCQSYDNSVRGSRVFGQGTKVEIK

SEQ ID NO: 2406 - protein, 110 aa, synthetic construct
DIQMTQSPSSLSASVGDRVTITCSGDNLRGYYASWYQQKPGKAPKLLIYLSSDLQSGVPSRFSGSGSGTDFTLTISSLQPEDFATYYCIARSNKGNPHVLFGQGTKVEIK

SEQ ID NO: 2407 - protein, 107 aa, synthetic construct
DIQMTQSPSSLSASVGDRVTITCSGDNLGDKYVHWYQQKPGKAPKLLIYGKNIRPSGVPSRFSGSGSGTDFTLTISSLQPEDFANYYCQQTYSIPYTFGQGTKVEIK

SEQ ID NO: 2408 - protein, 108 aa, synthetic construct
DIQMTQSPSSLSASVGDRVTITCSGDNLGDKYVHWYQQKPGKAPKLLIYAASTLQRGVPSRFSGSGSGTDFTLTISSLQPEDFATYYCAAWDFSPAIVFGQGTKVEIK

SEQ ID NO: 2409 - protein, 107 aa, synthetic construct
DIQMTQSPSSLSASVGDRVTITCRASQRISSFLNWYQQKPGKAPKLLIYDASNLQSGVPSRFSGSGSGTDFTLTISSLQPEDFATYYCQPSFYFPYAFGQGTKVEIK

SEQ ID NO: 2410 - protein, 108 aa, synthetic construct
DIQMTQSPSSLSASVGDRVTITCRASQTIGDYLNWYQQKPGKAPKLLIYLGSELQSGVPSRFSGSGSGTDFTLTINSLQPEDFATYYCQTWDTGESGVFGQGTKVEIK

SEQ ID NO: 2411 - protein, 110 aa, synthetic construct
DIQMTQSPSSLSASVGDRVTITCRASQDIKNYLNWYQQKPGKAPKLLIYAVTSRASGVPSRFSGSGSGTDFTLTISSLQPEDFATYYCQQGYNSNDVDNVFGQGTKVEIK

SEQ ID NO: 2412 - protein, 107 aa, synthetic construct
DIQMTQSPSSLSASVGDRVTITCSGDKLGDKYTSWYQQKPGKVPKLLIYQNDKRPSGVPSRFSGSGSGTDFTLTISSLQPEDFATYYCQQNNNWPTTFGQGTKVEIK

SEQ ID NO: 2413 - protein, 106 aa, synthetic construct
DIQMTQSPSSLSASVGDRVTITCRASQTIGDYLNWYQQKPGKAPKLLIYETSKLASGVPSRFSGSGSGTDFTLTISSLQPEDFATYYCQQSYSTPTFGQGTKVEIK

SEQ ID NO: 2414 - protein, 107 aa, synthetic construct
DIQMTQSPSSLSASVGDRVTITCRASQTIGDYLNWYQQKPGKAPKLLIYGTTSMESGVPSRFSGSGSGTDFTLTISSLQPEDFATYYCQQSNSWPYTFGQGTKVEIK

SEQ ID NO: 2415 - protein, 107 aa, synthetic construct
DIQMTQSPSSLSASVGDRVTITCRASQNIRSYLNWYQQKPGKAPKLLIYPKHNRPPGVPSRFSGSGSGTDFTLTISSLQPEDFATYYCQHSRDLTFPFGQGTKVEIK

SEQ ID NO: 2416 - protein, 107 aa, synthetic construct
DIQMTQSPSSLSASVGDRVTITCSGDNLRGYYASWYQQKPGKAPKLLIYGENSRPSGVPSRFSGSGSGTDFTLTISSLQPEDFATYYCQQSYENPLTFGQGTKVEIK

SEQ ID NO: 2417 - protein, 108 aa, synthetic construct
DIQMTQSPSSLSASVGDRVTITCRASQDIKNYLNWYQQKPGKAPKLLIYFTSTLAAGVPSRFSGSGSGTDFTLTISSLQPEDFATYYCQSGSSSANAVFGQGTKVEIK

SEQ ID NO: 2418 - protein, 107 aa, synthetic construct
DIQMTQSPSSLSASVGDRVTITCRASQPIAYFLSWYQQKPGKAPKLLIYENNNRPSGVPSRFSGSGSGTDFTLTISSLQPEDFATYYCQPSFLYPYTFGQGTKVEIK

SEQ ID NO: 2419 - protein, 107 aa, synthetic construct
DIQMTQSPSSLSASVGDRVTITCKASENVDTYVSWYQQKPGKAPKLLIYDDIDRPSGVPSRFSGSGSGTDFTLTISSLQPEDFATYYCQQSYSSPRTFGQGTKVEIK

SEQ ID NO: 2420 - protein, 106 aa, synthetic construct
DIQMTQSPSSLSASVGDRVTITCRTSQSLSSYLHWYQQKPGKAPKLLIYQNDKRPSGVPSRFSGSGSGTDFTLTISSLQPEDFATYYCKQSYDLFTFGQGTKVEIK

SEQ ID NO: 2421 - protein, 107 aa, synthetic construct
DIQMTQSPSSLSASVGDRVTITCRASQSISNNLNWYQQKPGKAPKLLIYGTSYRYSGVPSRFSGSGSGTDFTLTISSLQPEDFATYYCQQTYDTPLTFGQGTKVEIK

SEQ ID NO: 2422 - protein, 107 aa, synthetic construct
DIQMTQSPSSLSASVGDRVTITCRTSQDIGNYLNWYQQKPGKAPKLLIYGTSYRYSGVPSRFSGSGSGTDFTLTISSLQPEDFATYYCQPSFVFPYTFGQGTKVEIK

SEQ ID NO: 2423 - protein, 107 aa, synthetic construct; identical to SEQ ID NO: 2404

SEQ ID NO: 2424 - protein, 106 aa, synthetic construct; identical to SEQ ID NO: 2420

SEQ ID NO: 2425 - protein, 107 aa, synthetic construct
DIQMTQSPSSLSASVGDRVTITCRASQSIVTYLNWYQQKPGKAPKLLIYGNNNRPSGVPSRFSGSGSGTDFTLTISSLQPEDFATYYCAQGWGRPVTFGQGTKVEIK

SEQ ID NO: 2426 - protein, 106 aa, synthetic construct
DIQMTQSPSSLSASVGDRVTITCSASSSVTYMHWYQQKPGKAPKLLIYNAKTLPEGVPSRFSGSGSGTDFTLTISSLQPEDFATYYCAQNLEIPRTFGQGTKVEIK

SEQ ID NO: 2427 - protein, 107 aa, synthetic construct
DIQMTQSPSSLSASVGDRVTITCRASQTIGDYLNWYQQKPGKAPKLLIYGASNLHSGVPSRFSGSGSGTDFTLTISSLQPEDFATYYCSQSTHVPYTFGQGTKVEIK

SEQ ID NO: 2428 - protein, 107 aa, synthetic construct; identical to SEQ ID NO: 2419

SEQ ID NO: 2429 - protein, 107 aa, synthetic construct
DIQMTQSPSSLSASVGDRVTITCKASENVDTYVSWYQQKPGKAPKLLIYHDNKRPSGVPSRFSGSGSGTDFTLTISSLQPEDFATYYCQQSYTTPTTFGQGTKVEIK

SEQ ID NO: 2430 - protein, 106 aa, synthetic construct; identical to SEQ ID NO: 2384

SEQ ID NO: 2431 - protein, 106 aa, synthetic construct; identical to SEQ ID NO: 2373

SEQ ID NO: 2432 - protein, 107 aa, synthetic construct; identical to SEQ ID NO: 2422

SEQ ID NO: 2433 - protein, 107 aa, synthetic construct
DIQMTQSPSSLSASVGDRVTITCRASQPIGPDLLWYQQKPGKAPKLLIYDNNIRPSGVPSRFSGSGSGTDFTLTISSLQPEDFATYYCAQNLEIPRTFGQGTKVEIK

SEQ ID NO: 2434 - protein, 107 aa, synthetic construct
DIQMTQSPSSLSASVGDRVTITCRASQSILSYLNWYQQKPGKAPKLLIYDASNLQSGVPSRFSGSGSGTDFTLTISSLQPEDFATYYCQQGYRFPLTFGQGTKVEIK

SEQ ID NO: 2435 - protein, 107 aa, synthetic construct
DIQMTQSPSSLSASVGDRVTITCRASQFIGRYFNWYQQKPGKAPKLLIYGATILADGVPSRFSGSGSGTDFTLTISSLQPEDFATYYCQQNNNWPTTFGQGTKVEIK

SEQ ID NO: 2436 - protein, 107 aa, synthetic construct
DIQMTQSPSSLSASVGDRVTITCRASQDVSSGVAWYQQKPGKAPKLLIYSSSYLEPGVPSRFSGSGSGTDFTLTISSLQPEDFATYYCQQSYSSAPTFGQGTKVEIK

SEQ ID NO: 2437 - protein, 107 aa, synthetic construct
DIQMTQSPSSLSASVGDRVTITCRASQDVSSGVAWYQQKPGKAPKLLIYHASQSISGVPSRFSGSGSGTDFTLTISSLQPEDFATYYCQQSYSTPRTFGQGTKVEIK

SEQ ID NO: 2438 - protein, 107 aa, synthetic construct
DIQMTQSPSSLSASVGDRVTITCRASQDVSSGVAWYQQKPGKAPKLLIYSSSYLEPGVPSRFSGSGSGTDFTLTISSLQPEDFATYYCQQGGYAPSTFGQGTKLEIK

SEQ ID NO: 2439 - protein, 107 aa, synthetic construct
DIQMTQSPSSLSASVGDRVTITCTGDKLAEKYVSWYQQKPGKAPKLLIYATSTLQSGVPSRFSGSGSGTDFTLTISSLQPEDFATYYCQQTALVPYTFGQGTKVEIK

SEQ ID NO: 2440 - protein, 109 aa, synthetic construct; identical to SEQ ID NO: 1869

SEQ ID NO: 2441 - protein, 107 aa, synthetic construct
DIQMTQSPSSLSASVGDRVTITCRASQSILSYLNWYQQKPGKAPKLLIYFTSTLAAGVPSRFSGSGSGTDFTLTISSLQPEDFATYYCQQSYSSAPTFGQGTKVEIK

SEQ ID NO: 2442 - protein, 110 aa, synthetic construct
DIQMTQSPSSLSASVGDRVTITCRATQSIRSFLNWYQQKPGKAPKLLIYYNSERPSGVPSRFSGSGSGTDFTLTISSLQPEDFATYYCQQGYTRSDIDNTFGQGTKVEIK

SEQ ID NO: 2443 - protein, 108 aa, synthetic construct
DIQMTQSPSSLSASVGDRVTITCRTSQDISNYLNWYQQKPGKAPKLLIYAASNVESGVPSRFSGSGSGTDFTLTISSLQPEDFATYYCASRNGWNHVVFGQGTKVEIK

SEQ ID NO: 2444 - protein, 106 aa, synthetic construct
DIQMTQSPSSLSASVGDRVTITCSASSSVTYMHWYQQKPGKAPKLLIYNAKTLPEGVPSRFSGSGSGTDFTLTISSLQPEDFATYYCQQSYENPLTFGQGTKVEIK

SEQ ID NO: 2445 - protein, 106 aa, synthetic construct
DIQMTQSPSSLSASVGDRVTITCRASSSVSYMHWYQQKPGKAPKLLIYGENSRPSGVPSRFSGSGSGTDFTLTISSLQPEDFATYYCQQGPGTPNTFGQGTKVEIK

SEQ ID NO: 2446 - protein, 107 aa, synthetic construct
DIQMTQSPSSLSASVGDRVTITCRTSQDISNYLNWYQQKPGKAPKLLIYAASDLESGVPSRFSGSGSGTDFTLTISSLQPEDFATYYCQQSSSIPWTFGQGTKVEIK

SEQ ID NO: 2447 - protein, 106 aa, synthetic construct
DIQMTQSPSSLSASVGDRVTITCSGDLGEKYVSWYQQKPGKAPKLLIYQDFKRPSGVPSRFSGSGSGTDFTLTISSLQPEDFATYYCQQPWRSPGTFGQGTKVEIK

SEQ ID NO: 2448 - protein, 107 aa, synthetic construct
DIQMTQSPSSLSASVGDRVTITCSGDNLRGYYASWYQQKPGKAPKLLIYGTTSLESGVPSRFSGSGSGTDFTLTISSLQPEDFATYYCAQGWGRPVTFGQGTKVEIK

SEQ ID NO: 2449 - protein, 107 aa, synthetic construct
DIQMTQSPSSLSASVGDRVTITCKASDHIGKFLTWYQQKPGKAPKLLIYDNNIRPSGVPSRFSGSGSGTDFTLTISSLQPEDFATYYCQHSRDLTFPFGQGTKVEIK

SEQ ID NO: 2450 - protein, 107 aa, synthetic construct
DIQMTQSPSSLSASVGDRVTITCKASENVDTYVSWYQQKPGKAPKLLIYDNNIRPSGVPSRFSGSGSGTDFTLTISSLQPEDFATYYCQRAFGTQLTFGQGTKVEIK

SEQ ID NO: 2451 - protein, 107 aa, synthetic construct
DIQMTQSPSSLSASVGDRVTITCRASQTIGDYLNWYQQKPGKAPKLLIYYNSERPSGVPSRFSGSGSGTDFTLTISSLQPEDFANYYCSQSTHVPPTFGQGTKVEIK

SEQ ID NO: 2452 - protein, 107 aa, synthetic construct
DIQMTQSPSSLSASVGDRVTITCRASQPIGPDLLWYQQKPGKAPKLLIYGKKNRPSGVPSRFSGSGSGTDFTLTISSLQPEDFATYYCQQSYSPPLTFGQGTKVEIK

SEQ ID NO: 2453 - protein, 107 aa, synthetic construct; identical to SEQ ID NO: 2364

SEQ ID NO: 2454 - protein, 107 aa, synthetic construct
DIQMTQSPSSLSASVGDRVTITCSGDNLRDYIVHWYQQKPGKAPKLLIYDNNIRPSGVPSRFSGSGSGTDFTLTISSLQPEDFATYYCQSYDKSNVVFGQGTKVEIK

SEQ ID NO: 2455 - protein, 106 aa, synthetic construct; identical to SEQ ID NO: 2413

SEQ ID NO: 2456 - protein, 107 aa, synthetic construct
DIQMTQSPSSLSASVGDRVTITCRASQFIGRYFNWYQQKPGKAPKLLIYGATILADGVPSRFSGSGSGTDFTLTISSLQPEDFATYYCQQSYSSPLTFGQGTKVEIK

SEQ ID NO: 2457 - protein, 107 aa, synthetic construct
DIQMTQSPSSLSASVGDRVTITCKASENVDTYVSWYQQKPGKAPKLLIYHASQSISGVPSRFSGSGSGTDFTLTISSLQPEDFATYYCQQYGSSPLTFGQGTKVEIK

SEQ ID NO: 2458 - protein, 107 aa, synthetic construct
DIQMTQSPSSLSASVGDRVTITCKASENVDTYVSWYQQKPGKAPKLLIYGQHNRPSGVPSRFSGSGSGTDFTLTISSLQPEDFATYYCQQSYENPLTFGQGTKVEIK

SEQ ID NO: 2459 - protein, 107 aa, synthetic construct
DIQMTQSPSSLSASVGDRVTITCRASQTIGDYLNWYQQKPGKAPKLLIYENNNRPSGVPSRFSGSGSGTNFTLTISSLQPEDFATYYCQQSTILPLTFGQGTKVEIK

SEQ ID NO: 2460 - protein, 110 aa, synthetic construct
DIQMTQSPSSLSASVGDRVTITCRTSQTIERRLNWYQQKPGKAPKLLIYQNDKRPSGVPSRFSGSGSGTDFTLTISSLQPEDFATYYCSTRSSKGNPHVLFGQGTKVEIK

SEQ ID NO: 2461 - protein, 107 aa, synthetic construct; identical to SEQ ID NO: 2412

SEQ ID NO: 2462 - protein, 107 aa, synthetic construct
DIQMTQSPSSLSASVGDRVTITCSGDNLGDKYVHWYQQKPGKAPKLLIYFTSTLAAGVPSRFSGSGSGTDFTLTISSLQPEDFATYYCQNGHSFPLTFGQGTKVEIK

SEQ ID NO: 2463 - protein, 107 aa, synthetic construct
DIQMTQSPSSLSASVGDRVTITCRASQDVSSGVAWYQQKPGKAPKLLIYGASNLHSGVPSRFSGSGSGTDFTLIISSLQPEDFATYYCQQGPGTPNTFGQGTKVEIK

SEQ ID NO: 2464 - protein, 107 aa, synthetic construct
DIQMTQSPSSLSASVGDRVTITCRTSQDISNYLNWYQQKPGKAPKLLIYGKNIRPSGVPSRFSGSGSGTDFTLTISSLQPEDFATYYCQESLSASYTFGQGTKVEIK

SEQ ID NO: 2465 - protein, 108 aa, synthetic construct
DIQMTQSPSSLSASVGDRVTITCQGDFLRSYYASWYQQKPGKAPKLLIYGNNNRPSGVPSRFSGSGSGTDFTLTISSLQPEDFATYYCGFDNGGDIDVFGQGTKVEIK

SEQ ID NO: 2466 - protein, 107 aa, synthetic construct
DIQMTQSPSSLSASVGDRVTITCRTSQDISNYLNWYQQKPGKAPKLLIYDTSKVASGVPSRFSGSGSGTDFTLTISSLQPEDFATYYCQQTYDTPLTFGQGTKVEIK

SEQ ID NO: 2467 - protein, 107 aa, synthetic construct
DIQMTQSPSSLSASVGDRVTITCRASQSILSYLNWYQQKPGKAPKLLIYDASSLHTGVPSRFSGSGSGTDFTLTISSLQPEDFATYYCQHSRDLTFPFGQGTKVEIK

SEQ ID NO: 2468 - protein, 109 aa, synthetic construct
DIQMTQSPSSLSASVGDRVTITCRASQNIRSYLNWYQQKPGKAPKLLIYSASVLQSGVPSRFSGSGSGTDFTLTISSLQPEDFATYYCKSRAYSGNLVEFGQGTKVEIK

SEQ ID NO: 2469 - protein, 109 aa, synthetic construct
DIQMTQSPSSLSASVGDRVTITCSASQDINKYLNWYQQKPGKAPKLLIHSASNLESGVPSRFSGSGSGTDFTLTISSLQPEDFATYYCSTYTFVGFTTVFGQGTKVEIK

SEQ ID NO: 2470 - protein, 110 aa, synthetic construct
DIQMTQSPSSLSASVGDRVTITCRASEVEYHGTSLMHWYQQKPGKAPKLLIYGTSNLESGVPSRFSGSGSGTDFTLTISSLQPEDFATYYCQQVVWRPFTFGQGTKVEIK

SEQ ID NO: 2471 - protein, 107 aa, synthetic construct
DIQMTQSPSSLSASVGDRVTITCRASQTIERRLNWYQQKPGKAPKLLIYEDTKRPSGVPSRFSGSGSGTDFTLTISSLQPEDFATYYCAQGAALPRTFGQGTKVEIK

SEQ ID NO: 2472 - protein, 106 aa, synthetic construct
DIQMTQSPSSLSASVGDRVTITCRPNQNIATYINWYQQKPGKAPKLLIYDTSKVASGVPSRFSGSGSGTDFTLTISSLQPEDFATYYCQQSYSPLTFGQGTKVEIK

SEQ ID NO: 2473 - protein, 107 aa, synthetic construct; identical to SEQ ID NO: 2371

SEQ ID NO: 2474 - protein, 110 aa, synthetic construct
DIQMTQSPSSLSASVGDRVTITCQGDFLRSYYASWYQQKPGKAPKLLIYGKNIRPSGVPSRFSGSGSGTDFTLTISSLQPEDFATYYCVARGTRGNPHVLFGQGTKVEIK

SEQ ID NO: 2475 - protein, 107 aa, synthetic construct
DIQMTQSPSSLSASVGDRVTITCTGDKLAEKYVSWYQQKPGKAPKLLIYYNSERPSGVPSRFSGSGSGTDFTLTISSLQPEDFATYYCAQGLRKPKTFGQGTKVEIK

SEQ ID NO: 2476 - protein, 106 aa, synthetic construct; identical to SEQ ID NO: 2472

SEQ ID NO: 2477 - protein, 110 aa, synthetic construct
DIQMTQSPSSLSASVGDRVTITCTGDKLAEKYVSWYQQKPGKAPKLLIYGASSRATGVPSRFSGSGSGTDFTLTISSLQPEDFATYYCVARAVRGNPHVLFGQGTKVEIK

SEQ ID NO: 2478 - protein, 106 aa, synthetic construct
DIQMTQSPSSLSASVGDRVTITCRASQRISSFLNWYQQKPGKAPKLLIYDNNIRPSGVPSRFSGSGSGTDFTLTISSLQPEDFATYYCQQSYSPLTFGQGTKVEIK

SEQ ID NO: 2479 - protein, 110 aa, synthetic construct; identical to SEQ ID NO: 2405

SEQ ID NO: 2480 - protein, 107 aa, synthetic construct; identical to SEQ ID NO: 2359

SEQ ID NO: 2481 - protein, 110 aa, synthetic construct
DIQMTQSPSSLSASVGDRVTITCRASQPIGPDLLWYQQKPGKAPKLLIYDASNLQSGVPSRFSGSGSGTDFTLTISSLQPEDFATYYCQQGYTRTDIDNTFGQGTKVEIK

SEQ ID NO: 2482 - protein, 110 aa, synthetic construct
DIQMTQSPSSLSASVGDRVTITCSGDNIGSIYASWYQQKPGKAPKLLIYQNDKRPSGVPSRFSGSGSGTDFTLTISSLQPEDFATYYCQQGYTRTDIDNTFGQGTKVEIK

SEQ ID NO: 2483 - protein, 108 aa, synthetic construct
DIQMTQSPSSLSASVGDRVTITCRASQTISSYLNWYQQKPGKAPKLLIYAVTSLASGVPSRFSGSGSGTDFTLTISSLQPEDFATYYCQQSYAVSPYTFGQGTKVEIK

SEQ ID NO: 2484 - protein, 110 aa, synthetic construct
DIQMTQSPSSLSASVGDRVTITCRASQTIGDYLNWYQQKPGKAPKLLIYAKNNRPSGVPSRFSGSGSGTDFTLTISSLQPEDFATYYCQQGYTRTDIDNTFGQGTKLEIK

SEQ ID NO: 2485 - protein, 107 aa, synthetic construct
DIQMTQSPSSLSASVGDRVTITCRASQTIERRLNWYQQKPGKAPKLLIYAASSLYSGVPSRFSGSGSGTDFTLTISSLQPEDFATYYCQQSQAAPLTFGQGTKVEIK

SEQ ID NO: 2486 - protein, 107 aa, synthetic construct
DIQMTQSPSSLSASVGDRVTITCRASQDIYQNLDWYQQKPGKAPKLLIYDASSSQSGVPSRFSGSGSGTDFTLTISSLQPEDFATYYCQQSYSSPRTFGQGTKVEIK

SEQ ID NO: 2487 - protein, 107 aa, synthetic construct
DIQMTQSPSSLSASVGDRVTITCKASENVDTYVSWYQQKPGKAPKLLIYDDIDRPSGVPSRFSGSGSGTDFTLTISSLQPEDFATYYCQQYDAYPPTFGQGTKVEIK

SEQ ID NO: 2488 - protein, 107 aa, synthetic construct
DIQMTQSPSSLSASVGDRVTITCRASQDIGNFLNWYQQKPGKAPKLLIYAASSLYSGVPSRFSGSGSGTDFTLTISSLQPEDFATYYCQQINELPYTFGQGTKVEIK

SEQ ID NO: 2489 - protein, 109 aa, synthetic construct; identical to SEQ ID NO: 1869

SEQ ID NO: 2490 - protein, 107 aa, synthetic construct
DIQMTQSPSSLSASVGDRVTITCRASQSIVTYLNWYQQKPGKAPKLLIYGNNNRPSGVPSRFSGSGSGTDFTLTISSLQPEDFATYYCQQSYENPLTFGQGTKVEIK

SEQ ID NO: 2491 - protein, 107 aa, synthetic construct
DIQMTQSPSSLSASVGDRVTITCSASQDINKYLNWYQQKPGKAPKLLIYAASNVESGVPSRFSGSGSGTDFTLTISSLQPEDFATYYCQQSYSNLWTFGQGTKVEIK

SEQ ID NO: 2492 - protein, 107 aa, synthetic construct
DIQMTQSPSSLSASVGDRVTITCRASQYIGTALNWYQQKPGKAPKLLIYHASQSISGVPSRFSGSGSGTDFTLTISSLQPEDFATYYCAQTGTHPTTFGQGTKVEIK

SEQ ID NO: 2493 - protein, 107 aa, synthetic construct
DIQMTQSPSSLSASVGDRVTITCRASQTIERRLNWYQQKPGKAPKLLIYDASSLHTGVPSRFSGSGSGTDFTLTISSLQPEDFATYYCQAWGSSTVIFGQGTKVEIK

SEQ ID NO: 2494 - protein, 109 aa, synthetic construct
DIQMTQSPSSLSASVGDRVTITCSGDTLGGKYVWWYQQKPGKAPKLLIYGATILADGVPSRFSGSGSGTDFTLTISSLQPEDFATYYCNSRDNSGTDLIFGQGTKVEIK

SEQ ID NO: 2495 - protein, 106 aa, synthetic construct
DIQMTQSPSSLSASVGDRVTITCSGDLGEKYVSWYQQKPGKAPKLLIYGQHNRPSGVPSRFSGSGSGTDFTLTISSLQPEDFATYYCQQGYRFPLTFGQGTKVEIK

SEQ ID NO: 2496 - protein, 107 aa, synthetic construct
DIQMTQSPSSLSASVGDRVTITCRPNQNIATYINWYQQKPGKAPKLLIYATSTLQSGVPSRFSGSGSGTDFTLTISSLQPEDFATYYCQQSYSRPYTFGQGTKVEIK

SEQ ID NO: 2497 - protein, 107 aa, synthetic construct
DIQMTQSPSSLSASVGDRVTITCRASQDIKNYLNWYQQKPGKAPKLLIYHASQSISGVPSRFSGSGSGTDFTLTISSLQPEDFATYYCQQRDTTPWTFGQGTKVEIK

SEQ ID NO: 2498 - protein, 108 aa, synthetic construct
DIQMTQSPSSLSASVGDRVTITCSGDKLGDKYTSWYQQKPGKAPKLLIYQMSHLASGVPSRFSGSGSGTDFTLTISSLQPEDFATYYCQAWDRNTYVVFGQGTKVEIK

SEQ ID NO: 2499 - protein, 107 aa, synthetic construct
DIQMTQSPSSLSASVGDRVTITCTGDKLAEKYVSWYQQKPGKAPKLLIYEDTKRPSGVPSRFSGSGSGTDFTLTISSLQPEDFATYYCFQGSHVPVTFGQGTKVEIK

SEQ ID NO: 2500 - protein, 107 aa, synthetic construct
DIQMTQSPSSLSASVGDRVTITCSASSSVTYMHWYQQKPGKAPKLLIYGKNIRPSGVPSRFSGSGSGTDFTLTISSLQPEDFATYYCQSGSSSANAVFGQGTKVEIK

SEQ ID NO: 2501 - protein, 110 aa, synthetic construct; identical to SEQ ID NO: 2361

SEQ ID NO: 2502 - protein, 108 aa, synthetic construct
DIQMTQSPSSLSASVGDRVTITCTGDKLAEKYVSWYQQKPGKAPKLLIYGTSNLESGVPSRFSGSGSGTDFTLTISSLQPEDFATYYCSSFAGNSLEVFGQGTKVEIK

SEQ ID NO: 2503 - protein, 107 aa, synthetic construct
DIQMTQSPSSLSASVGDRVTITCRASQTIGDYLNWYQQKPGKAPKLLIYAVTSLASGVPSRFSGSGSGTDFTLTISSLQPEDFATYYCQQSYRAPQTFGQGTKVEIK

SEQ ID NO: 2504 - protein, 108 aa, synthetic construct
DIQMTQSPSSLSASVGDRVTITCSGDNLGDKYVHWYQQKPGKAPKLLIYGRNKRPSGVPSRFSGSGSGTDFTLTISSLQPEDFATYYCQAWDRNTYVVFGQGTKVEIK

SEQ ID NO: 2505 - protein, 107 aa, synthetic construct
DIQMTQSPSSLSASVGDRVTITCRASQSISNNLNWYQQKPGKAPKLLIYATSNLASGVPSRFSGSGSGTDFTLTISSLQPEDFATYYCQQGDALPPTFGQGTKVEIK

SEQ ID NO: 2506 - protein, 107 aa, synthetic construct
DIQMTQSPSSLSASVGDRVTITCRASQPIGPDLLWYQQKPGKAPKLLIYHASQSISGVPSRFSGSGSGTDFTLTISSLQPEDFATYYCQQSYSTPYTFGQGTKVEIK

SEQ ID NO: 2507 - protein, 112 aa, synthetic construct
DIQMTQSPSSLSASVGDRVTITCSGDNIGSIYASWYQQKPGKAPKLLIYDNNIRPSGVPSRFSGSGSGTDFTLTISSLQPEDFATYYCQTNYGTSSSNYGFAFGQGTKVEIK

SEQ ID NO: 2508 - protein, 107 aa, synthetic construct
DIQMTQSPSSLSASVGDRVTITCTGKLAEKYVSWYQQKPGKAPKLLIYGTSYRYSGVPSRFSGSGSGTDFTLTISSLQPEDFATYYCQSVDYSAGLTFGQGTKVEIK

SEQ ID NO: 2509 - protein, 107 aa, synthetic construct
DIQMTQSPSSLSASVGDRVTITCRASQDIYQNLDWYQQKPGKAPKLLIYGASSRATGVPSRFSGSGSGTDFTLTISSLQPEDFATYYCQQDAFHPPTFGQGTKVEIK

SEQ ID NO: 2510 - protein, 107 aa, synthetic construct
DIQMTQSPSSLSASVGDRVTITCSGDKLGHTYTSWYQQKPGKAPKLLIYGNNNRPSGVPSRFSGSGSGTDFTLTISSLQPEDFATYYCGQGVLWPATYGQGTKVEIK

SEQ ID NO: 2511 - protein, 107 aa, synthetic construct
DIQMTQSPSSLSASVGDRVTITCKASQHVITHVTWYQQKPGKAPKLLIYSASNLESGVPSRFSGSGSGTDFTLTISSLQPEDFATYYCQQSYSHPYTFGQGTKVEIK

SEQ ID NO: 2512 - protein, 112 aa, synthetic construct
DIQMTQSPSSLSASVGDRVTITCKSSQSLLYSNGKTFLSWYQQKPGKAPKLLIYQNDKRPSGVPSRFSGSGSGTDFTLTISSLQPEDFATYYCSAFTHNSDVFGQGTKVEIK

SEQ ID NO: 2513 - protein, 107 aa, synthetic construct
DIQMTQSPSSLSASVGDRVTITCRASQSILSYLNWYQQKPGKAPKLLIYGASNLHSGVPSRFSGSGSGTDFTLTISSLQPEDFATYYCQQSYSIPLTFGQGTKVEIK

SEQ ID NO: 2514 - protein, 107 aa, synthetic construct
DIQMTQSPSSLSASVGDRVTITCRASQSVDRYFNWYQQKPGKAPKLLIYHDNKRPSGVPSRFSGSGSGTDFTLTISSLQPEDFATYYCAQGLRKPKTFGQGTKVEIK

SEQ ID NO: 2515 - protein, 109 aa, synthetic construct
DIQMTQSPSSLSASVGDRVTITCRASQPIAYFLSWYQQKPGKAPKLLIYQDFKRPSGVPSRFSGSGSGTDFTLTISSLQPEDFATYYCAGGYSSISDNGFGQGTKVEIK

SEQ ID NO: 2516 - protein, 107 aa, synthetic construct
DIQMTQSPSSLSASVGDRVTITCSASQDINKYLNWYQQKPGKAPKLLIYATSTLQSGVPSRFSGSGSGTDFTLTISSLQPEDFATYYCQQSYTTPWTFGQGTKVEIK

SEQ ID NO: 2517 - protein, 106 aa, synthetic construct; identical to SEQ ID NO: 2384

SEQ ID NO: 2518 - protein, 107 aa, synthetic construct
DIQMTQSPSSLSASVGDRVTITCRASQSIGAYLNWYQQKPGKAPKLLIYDASSLRSGVPSRFSGSGSGTDFTLTISSLQPEDFATYYCQQTYSNPITFGGGTKVEIK

SEQ ID NO: 2519 - protein, 107 aa, synthetic construct
DIQMTQSPSSLSASVGDRVTITCRASRSISSYLNWYQQKPGKAPKLLIYAGSNLQSGVPSRFSGSGSGTDFTLTISSLQPEDFATYYCQQSFSAPPTFGGGTKVEIK

SEQ ID NO: 2520 - protein, 107 aa, synthetic construct
DIQMTQSPSSLSASVGDRVTITCRASQNIYSYLNWYQQKPGKAPKLLIYASSNLQSGVPSRFSGSGSGTDFTLTISSLQPEDFATYYCQQTYSVPFTFGGGTKVEIK

SEQ ID NO: 2521 - protein, 107 aa, synthetic construct
DIQMTQSPSSLSASVGDRVTITCRASQSIYTYLNWYQQKPGKAPKLLIYTASALQTGVPSRFSGSGSGTDFTLTISSLQPEDFATYYCQQSYRIPLTFGGGTKVEIK

SEQ ID NO: 2522 - protein, 109 aa, synthetic construct
DIQMTQSPSSLSASVGDRVTITCRASQSLSTYLNWYQQKPGKAPKLLIYAASSLHSGVPSRFSGSGSGTDFTLTISSLQPEDFATYYCQQSYSTPPEYTFGGGTKVEIK

SEQ ID NO: 2523 - protein, 107 aa, synthetic construct
DIQMTQSPSSLSAYVGDRVTITCRASQSIGIHLNWYQQKPGKAPKLLIYGASRLQTGVPSRFSGSGSGTDFTLTISSLQPEDFATYYCQQSYSAPLTFGGGTKVEIK

SEQ ID NO: 2524 - protein, 107 aa, synthetic construct
DIQMTQSPSSLSASVGDRVTITCRASQSIYNYLNWYQQKPGKAPKLLIYAASSLQRGVPSRFSGSGSGTDFTLTISSLQPEDFATYYCQQSYGAPFTFGGGTKVEIK

SEQ ID NO: 2525 - protein, 107 aa, synthetic construct
DIQMTQSPSSLSASVGDRVTITCRGSQSISSFLNWYQQKPGKAPKLLIYAASKLHSGVPSRFSGSGSGTDFTLTISSLQPEDFATYYCQHSYSTPLTFGGGTKVEIK

SEQ ID NO: 2526 - protein, 106 aa, synthetic construct
DIQMTQSPSSLSASVGDRVTITCRASQSISNYLHWYQQKPGKAPKLLIYGASILQSGVPSRFSGSGSGTDFTLTISSLQPEDFATYYCQQSYSTPSFGGGTKVEIK

SEQ ID NO: 2527 - protein, 107 aa, synthetic construct
DIQMTQSPSSLSASVGDRVTITCRASQTISYYLNWYQQKPGKAPKLLIYETSNLQSGVPSRFSGSGSGTDFTLTISSLQPEDFATYYCQQTYSTPLTFGGGTKVEIK

SEQ ID NO: 2528 - protein, 107 aa, synthetic construct
DIQMTQSPSSLSASVGDRVTITCRASQRIITYLNWYQQKPGKAPKLLIYGASILQGGVPSRFSGSGSGTDFTLTISSLQPEDFATYYCQQSYSTTPTFGGGTKVEIK

SEQ ID NO: 2529 - protein, 107 aa, synthetic construct
DIQMTQSPSSLSASVGDRVTITCRASQSIYTYLNWYQQKPGKAPKLLIYDVSSFQSGVPSRFSGSGSGTDFTLTISSLQPEDFATYYCQQGYSTPLTFGGGTKVEIK

SEQ ID NO: 2530 - protein, 107 aa, synthetic construct
DIQMTQSPSSLSASVGDRVTITCRASQNINKYLNWYQQKPGKAPKLLIYLASTLHSGVPSRFSGSGSGTDFTLTISSLQPEDFATYYCQQSHSIPRTFGGGTKVEIK

SEQ ID NO: 2531 - protein, 107 aa, synthetic construct
DIQMTQSPSSLSASVGDRVTITCRASQYINNYLNWYQQKPGKAPKLLIYASSTLQRGVPSRFSGSGSGTDFTLTISSLQPEDFATYYCQQSFSTPITFGGGTKVEIK

SEQ ID NO: 2532 - protein, 107 aa, synthetic construct
DIQMTQSPSSLSASVGDRVTITCRASQTIGSYLNWYQQKPGKAPKLLIYSASTLQTGVPSRFSGSGSGTDFTLTISSLQPEDFATYYCQQSYSPPLTFGGGTKVEIK

SEQ ID NO: 2533 - protein, 107 aa, synthetic construct
DIQMTQSPSSLSASVGDRVTITCRASQTISYYLNWYQQKPGKAPKLLIYDATSLQSGVPSRFSGSGSGTDFTLTISSLQPEDFATYYCQQTYSLPLTFGGGTKVEIK

SEQ ID NO: 2534 - protein, 107 aa, synthetic construct
DIQMTQSPSSLSASVGDRVTITCRASQGISKYLNWYQQKPGKAPKLLIYGASNVQSGVPSRFSGSGSGTDFTLTISSLQPEDFATYYCQQSYNTPTTFGGGTKVEIK

SEQ ID NO: 2535 - protein, 107 aa, synthetic construct
DIQMTQSPSSLSASVGDRVTITCRASQNIYSYLNWYQQKPGKAPKLLIYEASTLQTGVPSRFSGSGSGTDFTLTISSLQPEDFATYYCQQSFSPPFTFGGGTKVEIK

SEQ ID NO: 2536 - protein, 107 aa, synthetic construct
DIQMTQSPSSLSASVGDRVTITCRASQTITSYLNWYQQRPGKAPKLLIYASSSLQTGVPSRFSGSGSGTDFTLTISSLQPEDFATYYCQQSYSTPITFGGGTKVEIK

SEQ ID NO: 2537 - protein, 107 aa, synthetic construct
DIQMTQSPSSLSASVGDRVTITCRASQNINTFLNWYQQKPGKAPKLLIYASSNLQSGVPSRFSGSGSGTDFTLTISSLQPEDFATYYCQQGYRTPITFGGGTKVEIK

SEQ ID NO: 2538 - protein, 107 aa, synthetic construct
DIQMTQSPSSLSASVGDRVTITCRASQTIGTYLHWYQQKPGKAPKLLIYGTSSLQSGVPSRFSGSGSGTDFTLTISSLQPEDFATYYCQQTYSPPPDFGGGTKVEIK

SEQ ID NO: 2539 - protein, 106 aa, synthetic construct
DIQMTQSPSSLSASVGDRVTITCRASQSISNYLHWYQQKPGKAPKLLIYGASILQSGVPSRFSGSGSGTDFTLTISSLQPEDFATYYCQQSYSTPSFFGGTTVEIK

SEQ ID NO: 2540 - protein, 108 aa, synthetic construct
DIQMTQSPSSLSASVGDRVTITCRASQNIDRYLNWYQQKPGKAPKLLIYAASALQSGVPSRFSGSGSGTDFTLTISSLQPEDFATYYCQQSYSILPVTFGQGTKVEIK

SEQ ID NO: 2541 - protein, 107 aa, synthetic construct
DIQMTQSPSSLSASVGDRVTITCRASQSIGTFLNWYQQKPGKAPKLLIYGTSNLQSGVPSRFSGSGSGTDFTLTISSLQPEDFATYYCQQGYRTPLTFGQGTKVEIK

SEQ ID NO: 2542 - protein, 107 aa, synthetic construct
DIQMTQSPSSLSASVGDRVTITCRASQSVSRFLNWYQQKPGKAPKLLIYAASTLQPGVPSRFSGSGSGTDFTLTISSLQPEDFATYYCQQSYETPLTFGQGTKVEIK

SEQ ID NO: 2543 - protein, 107 aa, synthetic construct
DIQMTQSPSSLSASVGDRVTITCRASQSISTYLNWYQQKPGKAPKLLIYRASTLQSGVPSRFSGSGSGTDFTLTISSLQPEDFATYYCQQSYSNPPTFGQGTKVEIK

SEQ ID NO: 2544 - protein, 107 aa, synthetic construct
DIQMTQSPSSLSASVGDRVTITCRASQSISRYLNWYQQKPGKAPKLLIYAESTLQSGVPSRFSGSGSGTDFTLTISSLQPEDFATYYCQQSYTIPLTFGQGTKVEIK

SEQ ID NO: 2545 - protein, 107 aa, synthetic construct
DIQMTQSPSSLSASVGDRVTITCRASQYINNYLNWYQQKPGKAPKLLIYASSTLQRGVPSRFSGSGSGTDFTLTISSLQPEDFATYYCQQSFSTPITFGQGTKVEIK

SEQ ID NO: 2546 - protein, 107 aa, synthetic construct
DIQMTQSPSSLSASVGDRVTITCRASESITTYLNWYQQKPGKAPKLLIYTASGLQSGVPSRFSGSGSGTDFTLTISSLQPEDFATYYCQQSYTVPITFGQGTKVEIK

SEQ ID NO: 2547 - protein, 107 aa, synthetic construct
DIQMTQSPSSLSASVGDRVTITCRASQTISNFLNWYQQKPGKAPKLLIYAASTLQYGVPSRFSGSGSGTDFTLTISSLQPEDFATYYCQQNYRSPLTFGQGTKVEIK

SEQ ID NO: 2548 - protein, 107 aa, synthetic construct
DIQMTQSPSSLSASVGDRVTITCRASRSITNYLNWYQQKPGKAPKLLIYGASNLQSGVPSRFSGSGSGTDFTLTISSLQPEDFATYYCQQSYTTPPTFGQGTKVEIK

SEQ ID NO: 2549 - protein, 107 aa, synthetic construct
DIQMTQSPSSLSASVGDRVTITCRASQSIGTFLNWYQQKPGKAPKLLIYGTSNLQSGVPSRFSGSGSGTDFTLTISSLQPEDFATYYCQQGYRTPLTFGGGTKVEIK

SEQ ID NO: 2550 - protein, 107 aa, synthetic construct
DIQMTQSPSSLSASVGDRVTITCRASQTISNFLNWYQQKPGKAPKLLIYAASTLQYGVPSRFSGSGSGTDFTLTISSLQPEDFATYYCQQNYRSPLTFGGGTKVEIK

SEQ ID NO: 2551 - protein, 107 aa, synthetic construct
DIQMTQSPSSLSASVGDRVTITCRASQTIGSYLNWYQQKPGKAPKLLIYAASTLQPGVPSRFSGSGSGTDFTLTISSLQPEDFATYYCQQSYETPLTFGGGTKVEIK

SEQ ID NO: 2552 - protein, 107 aa, synthetic construct
DIQMTQSPSSLSASVGDRVTITCRASQSISSYVSWYQQKPGKAPKLLIYDASSLSGGVPSRFSGSGSGTDFTLTISSLQPEDFATYYCQQSYRIPLTFGGGTKVEIK

SEQ ID NO: 2553 - protein, 107 aa, synthetic construct
DIQMTQSPSSLSASVGDRVTITCRASRSITNYLNWYQQKPGKAPKLLIYGASNLQSGVPSRFSGSGSGTDFTLTISSLQPEDFATYYCQQSYTTPPTFGGGTKVEIK

SEQ ID NO: 2554 - protein, 107 aa, synthetic construct
DIQMTQSPSSLSASVGDRVTITCRASQSISSYLNWYQQKPGKAPKLLIYAASSWQSGVPSRFSGSGSGTDFTLTISSLQPEDFATYYCQQSFSTPQTFGGGTKVEIK

SEQ ID NO: 2555 - protein, 107 aa, synthetic construct
DIQMTQSPSSLSASVGDRVTITCRASQTIGSYLHWYQQKPGKAPKLLIYGTSSLQSGVPSRFSGSGSGTDFTLTISSLQPEDFATYYCQQTYSPPPDFGGGTKVEIK

SEQ ID NO: 2556 - protein, 107 aa, synthetic construct
DIQMTQSPSSLSASVGDRVTITCRASQSIGEYLNWYQQKPGKAPKLLIYSASSLQNGVPSRFSGSGSGTDFTLTISSLQPEDFATYYCQQTYSFPLTFGGGTKVEIK

SEQ ID NO: 2557 - protein, 107 aa, synthetic construct
DIQMTQSPFSLSASVGDRVTITCRASQNILTYLNWYQQKPGKAPKLLIYGASTLRSGVPSRFSGSGSGTDFTLTISSLQPEDFATYYCQQSYRLPLTFGGGTKVEIK

SEQ ID NO: 2558 - protein, 107 aa, synthetic construct; identical to SEQ ID NO: 2518

SEQ ID NO: 2559 - protein, 107 aa, synthetic construct
DIQMTQSPSSLSASVGDRVTITCRASQSVSTYLNWYQQKPGKAPKLLIYATSTLQGGVPSRFSGSGSGTDFTLTISSLQPEDFATYYCQQSYTPPITFGGGTKVEIK

SEQ ID NO: 2560 - protein, 107 aa, synthetic construct
DIQMTQSPSSLSASVGDRVTITCRASQYIGTYLNWYQQKPGKAPKLLIYAAANLQSGVPSRFSGSGSGTDFTLTISSLQPEDFATYYCQQSYSIPLTFGGGTKVEIK

SEQ ID NO: 2561 - protein, 107 aa, synthetic construct
DIQMTQSPSSLSASVGDRVTITCRASQNIGGYLNWYQQKPGKAPKLLIYGASRLQSGVPSRFSGSGSGTDFTLTISSLQPEDFATYYCQQSYSTPFTFGGGTKVEIK

SEQ ID NO: 2562 - protein, 107 aa, synthetic construct
DIQMTQSPSSLSASVGDRVTITCRASQTISSYLSWYQQKPGKAPKLLIYDASTLQSGVPSRFSGSGSGTDFTLTISSLQPEDFATYYCQQSYRIPLTFGGGTKVEIK

SEQ ID NO: 2563 - protein, 107 aa, synthetic construct
DIQMTQSPSSLSASVGDRVTITCRASQSIKSYLNWYQQKPGKAPKLLIYSASSLLSGVPSRFSGSGSGTDFTLTISSLQPEDFATYYCQQSYTLPRTFGGGTKVEIK

SEQ ID NO: 2564 - protein, 107 aa, synthetic construct
DIQMTQSPSSLSASVGDRVTITCRASQNIINYLNWYQQKPGKAPKLLIYGASTLESGVPSRFSGSGSGTDFTLTISSLQPEDFATYYCQQSYSVPLTFGGGTKVEIK

SEQ ID NO: 2565 - protein, 107 aa, synthetic construct
DIQMTQSPSSLSASVGDRVTITCRTSQSISSYANWYQQKPGKAPKLLIYGASRLESGVPSRFSGSGSGTDFTLTISSLQPEDFATYYCQQTYSTPWTFGGGTKVGIK

SEQ ID NO: 2566 - protein, 107 aa, synthetic construct
DIQMTQSPSSLSASVGDRVTITCRVSQSISSYLHWYQQKPGKAPKLLIYAASSLQTGVPSRFSGSGSGTDFTLTISSLQPEDFATYYCQQSYTLPLTFGGGTKVEIK

SEQ ID NO: 2567 - protein, 107 aa, synthetic construct
DIQMTQSPSSLSASVGDRVTITCRASQSIATYLHWYQQKPGKAPKLLIYSASTLESGVPSRFSGSGSGTDFTLTISSLQPEDFATYYCQQSYRPPLTFGGGTKVEIK

SEQ ID NO: 2568 - protein, 107 aa, synthetic construct
DIQMTQSPSSLSASVGDRVTITCRASQSVSRFLNWYQQKPGKAPKLLIYAASTLQPGVPSRFSGSGSGTDFTLTISSLQPEDFATYYCQQSYETPLTFGGGTKVEIK

SEQ ID NO: 2569 - protein, 107 aa, synthetic construct; identical to SEQ ID NO: 2553

SEQ ID NO: 2570 - protein, 107 aa, synthetic construct; identical to SEQ ID NO: 2549

SEQ ID NO: 2571 - protein, 107 aa, synthetic construct; identical to SEQ ID NO: 2525

SEQ ID NO: 2572 - protein, 107 aa, synthetic construct
DIQMTQSPSSLSASVGDRVTITCRASQIIGTYLNWYQQKPGKAPKLLIYGSSNLQSGVPSRFSGSGSGTDFTLTISSLRPEDFATYYCQQSYGTPFTFGGGTKVEIK

SEQ ID NO: 2573 - protein, 108 aa, synthetic construct
DIQMTQSPSSLSASVGDRVTITCRASQSISKYLNWYQQKPGKAPKLLIYAATSLESGVPSRFSGSGSGTDFTLTISSLQPEDFATYYCQQSYSTPLFTFGGGTKVEIK

SEQ ID NO: 2574 - protein, 107 aa, synthetic construct
DIQMTQSPSSLSASVGDRVTITCRASQSIRSYLNWYQQKPGKAPKLLIYATSSLHSGVPSRFSGSGSGTDFTLTISSMQPEDFATYYCQQSFSLPPTFGGGTKVEIK

SEQ ID NO: 2575 - protein, 107 aa, synthetic construct; identical to SEQ ID NO: 2525

SEQ ID NO: 2576 - protein, 107 aa, synthetic construct
DIQMTQSPSSLSASVGDRVTITCRASQTISYYLNWYQQKPGKAPKLLIYGASSLQNGVPSRFSGSGSGTDFTLTISSLQPEDFATYYCQQGYSAPFTFGGGTKVEIK

SEQ ID NO: 2577 - protein, 107 aa, synthetic construct
DIQMTQSPSSLSASVGDRVTITCRASQSIGVYLNWYQQKPGKAPKLLIYSASSLQRGVPSRFSGSGSGTDFTLTISSLQPEDFATYYCQQSFTIPYTFGGGTKVEIK

SEQ ID NO: 2578 - protein, 107 aa, synthetic construct
DIQMTQSPSSLSASVGDRVTITCRASQSISTFLSWYQQKPGKAPKLLIYATSTLESGVPSRFSGSGSGTDFTLTISSLQPEDFATYYCQQSYSTPLTFGGGTKVEIK

SEQ ID NO: 2579 - protein, 106 aa, synthetic construct; identical to SEQ ID NO: 2526

SEQ ID NO: 2580 - protein, 107 aa, synthetic construct
DIQMTQSPSSLSASVGDRVTITCRASQSISTYLNWYQQKPGKAPKLLIYRASTLQSGVPSRFSGSGSGTDFTLTISSLQPEDFATYYCQQSYSNPPTFGGGTKVEIK

SEQ ID NO: 2581 - protein, 108 aa, synthetic construct
DIQMTQSPSSLSASVGDRVTITCRASQNIDRYLNWYQQKPGKAPKLLIYAASALQSGVPSRFSGSGSGTDFTLTISSLQPEDFATYYCQQSYSILPVTFGGGTKVEIK

SEQ ID NO: 2582 - protein, 107 aa, synthetic construct; identical to SEQ ID NO: 2568

SEQ ID NO: 2583 - protein, 107 aa, synthetic construct
DIQMTQSPSSLSASVGDRVTITCRASQSIPTYLNWYQQKPGKAPKLLIYAAANLQSGVPSRFSGSGSGTDFTLTISSLQPEDFATYYCQQSYATPFTFGGGTKVEIK

SEQ ID NO: 2584 - protein, 107 aa, synthetic construct; identical to SEQ ID NO: 2549

SEQ ID NO: 2585 - protein, 107 aa, synthetic construct; identical to SEQ ID NO: 2531

SEQ ID NO: 2586 - protein, 109 aa, synthetic construct; identical to SEQ ID NO: 2522

SEQ ID NO: 2587 - protein, 107 aa, synthetic construct; identical to SEQ ID NO: 2563

SEQ ID NO: 2588 - protein, 107 aa, synthetic construct
DIQMTQSPSSLSASVGDRVTITCRASESITTYLNWYQQKPGKAPKLLIYTASGLQSGVPSRFSGSGSGTDFTLTISSLQPEDFATYYCQQSYTVPITFGGGTKVEIK

SEQ ID NO: 2589 - protein, 107 aa, synthetic construct; identical to SEQ ID NO: 2556

SEQ ID NO: 2590 - protein, 107 aa, synthetic construct; identical to SEQ ID NO: 2549

SEQ ID NO: 2591 - protein, 107 aa, synthetic construct; identical to SEQ ID NO: 2588

SEQ ID NO: 2592 - protein, 107 aa, synthetic construct; identical to SEQ ID NO: 2525

SEQ ID NO: 2593 - protein, 107 aa, synthetic construct; identical to SEQ ID NO: 2549

SEQ ID NO: 2594 - protein, 107 aa, synthetic construct
DIQMTQSPSSLSASVGDRVTITCRASQDIRNYLNWYQQKPGKAPKLLIYATSSLQTGVPSRFSGSGSGTDFTLTISSLQPEDFATYYCQQSYGAPLTFGGGTKVEIK

SEQ ID NO: 2595 - protein, 107 aa, synthetic construct; identical to SEQ ID NO: 2532

SEQ ID NO: 2596 - protein, 107 aa, synthetic construct
DIQMTQSPSSLSASVGDRVTITCRAGQSISSYLNWYQQKPGKAPKLLIYASSTLQRGVPSRFSGSGSGTDFTLTISSLQPEDFATYYCQQSHSVPLTFGGGTKVEIK

SEQ ID NO: 2597 - protein, 107 aa, synthetic construct; identical to SEQ ID NO: 2559

SEQ ID NO: 2598 - protein, 107 aa, synthetic construct
DIQMTQSPSSLSASVGDRVTITCRASQRISRYLNWYQQKPGKAPKLLIYRASTLQSGVPSRFSGSGSGTDFTLTISSLQPEDFATYYCQQSHSSPLTFGGGTKVEIK

SEQ ID NO: 2599 - protein, 107 aa, synthetic construct
DIQMTQSPSSLSASVGDRVTITCRASQNIYSYLNWYQQKPGKAPKLLIYAASSLQTGVPSRFSGSGSGTDFTLTISSLQPEDFATYYCQQNYRSPLTFGGGTKVEIK

SEQ ID NO: 2600 - protein, 107 aa, synthetic construct; identical to SEQ ID NO: 2557

SEQ ID NO: 2601 - protein, 107 aa, synthetic construct; identical to SEQ ID NO: 2552

SEQ ID NO: 2602 - protein, 107 aa, synthetic construct; identical to SEQ ID NO: 2525

SEQ ID NO: 2603 - protein, 107 aa, synthetic construct; identical to SEQ ID NO: 2525

SEQ ID NO: 2604 - protein, 107 aa, synthetic construct; identical to SEQ ID NO: 2563

SEQ ID NO: 2605 - protein, 107 aa, synthetic construct
DIQMTQSPSSLSASVGDRVTITCRASQTISPYLNWYQQKPGKAPKLLIYAASTLQAGVPSRFSSSGSGTDFTLTISSLQPEDFATYYCQQSYSLPLTFGGGTKVEIK

SEQ ID NO: 2606 - protein, 107 aa, synthetic construct; identical to SEQ ID NO: 2533

SEQ ID NO: 2607 - protein, 107 aa, synthetic construct; identical to SEQ ID NO: 2523

SEQ ID NO: 2608 - protein, 107 aa, synthetic construct; identical to SEQ ID NO: 2518

SEQ ID NO: 2609 - protein, 107 aa, synthetic construct
DIQMTQSPSSLSASVGDRVTITCRASQNIAGYLNWYQQKPGKAPKLLIYGASTLHTGVPSRFSGSGSGTDFTLTISSLQPEDFATYYCRQSYSTPLTFGGGTKVEIK

SEQ ID NO: 2610 - protein, 107 aa, synthetic construct
DIQMTQSPSSLSASVGDRVTITCRGSQSISSFLNWYQQKPGKAPKLLIYAASKLHSGVPSRFSGSGSGTDFTLTISSLQPEDFATYYCQQSYSTPFTFGGGTKVEIK

SEQ ID NO: 2611 - protein, 107 aa, synthetic construct; identical to SEQ ID NO: 2518

SEQ ID NO: 2612 - protein, 107 aa, synthetic construct; identical to SEQ ID NO: 2557

SEQ ID NO: 2613 - protein, 107 aa, synthetic construct; identical to SEQ ID NO: 2549

SEQ ID NO: 2614 - protein, 107 aa, synthetic construct; identical to SEQ ID NO: 2532

SEQ ID NO: 2615 - protein, 107 aa, synthetic construct; identical to SEQ ID NO: 2555

SEQ ID NO: 2616 - protein, 107 aa, synthetic construct; identical to SEQ ID NO: 2549

SEQ ID NO: 2617 - protein, 109 aa, synthetic construct; identical to SEQ ID NO: 2522

SEQ ID NO: 2618 - protein, 108 aa, synthetic construct
DIQMTQSPSSLSASVGDRVTITCRASQYISTYLNWYQQKPGKAPKLLIYAASTLETGVPSRFSGSGSGTDFTLTISSLQPEDFATYYCQQSYSIPPVTFGGGTKVEIK

SEQ ID NO: 2619 - protein, 107 aa, synthetic construct; identical to SEQ ID NO: 2525

SEQ ID NO: 2620 - protein, 107 aa, synthetic construct; identical to SEQ ID NO: 2588

SEQ ID NO: 2621 - protein, 107 aa, synthetic construct; identical to SEQ ID NO: 2596

SEQ ID NO: 2622 - protein, 107 aa, synthetic construct
DIQMTQSPSSLSASVGDRVTITCRASQSIGAYLNWYQQKPGKAPKLLIYDASSLRSGVPSRFSGSGSGTDFTLTISSLQPEDFATYYCQQSYETPLTFGGGTKVEIK

SEQ ID NO: 2623 - protein, 107 aa, synthetic construct; identical to SEQ ID NO: 2525

SEQ ID NO: 2624 - protein, 107 aa, synthetic construct; identical to SEQ ID NO: 2568

SEQ ID NO: 2625 - protein, 107 aa, synthetic construct
DIQMTQSPSSLSASVGDRVTITCRASQPISSYLNWYQQKPGKAPKLLIYAASNLQTGVPSRFSGSGSGTDFTLTISSLQPEDFATYYCQQSYSPPITFGGGTKVEIK

SEQ ID NO: 2626 - protein, 107 aa, synthetic construct; identical to SEQ ID NO: 2549

SEQ ID NO: 2627 - protein, 107 aa, synthetic construct
DIQMTQSPSSLSASVGDRVTITCRASQGIDNYLNWYQQKPGKAPKLLIYATSRLQSGVPSRFSGSGSGTDFTLTISSLQPEDFATYYCQQSYSVPLTFGGGTKVEIK

SEQ ID NO: 2628 - protein, 107 aa, synthetic construct
DIQMTQSPSSLSASVGDRVTITCRASESITTYLNWYQQKPGKAPKLLIYTASGLQSGVPSRFSGSGSGTDFTLTISSLQPEDFATYYCQQGYRTPLTFGGGTKVEIK

SEQ ID NO: 2629 - protein, 107 aa, synthetic construct; identical to SEQ ID NO: 2549

SEQ ID NO: 2630 - protein, 107 aa, synthetic construct; identical to SEQ ID NO: 2588

SEQ ID NO: 2631 - protein, 107 aa, synthetic construct; identical to SEQ ID NO: 2533

SEQ ID NO: 2632 - protein, 107 aa, synthetic construct; identical to SEQ ID NO: 2550

SEQ ID NO: 2633 - protein, 107 aa, synthetic construct; identical to SEQ ID NO: 2568

SEQ ID NO: 2634 - protein, 107 aa, synthetic construct
DIQMTQSPSSLSASVGDRVTITCRASQSISNYLHWYQQKPGKAPKLLIYGASILQSGVPSRFSGSGSGTDFTLTISSLQPEDFATYYCQHSYSTPLTFGGGTKVEIK

SEQ ID NO: 2635 - protein, 107 aa, synthetic construct; identical to SEQ ID NO: 2588

SEQ ID NO: 2636 - protein, 107 aa, synthetic construct; identical to SEQ ID NO: 2568

SEQ ID NO: 2637 - protein, 107 aa, synthetic construct; identical to SEQ ID NO: 2549

SEQ ID NO: 2638 - protein, 107 aa, synthetic construct; identical to SEQ ID NO: 2530

SEQ ID NO: 2639 - protein, 107 aa, synthetic construct
DIQMTQSPSSLSASVGDRVTITCRASQTISNFLNWYQQKPGKAPKLLIYAASTLQYGVPSRFSGSGSGTDFTLTISSLQPEDFATYYCQQTYSFPLTFGGGTKVEIK

SEQ ID NO: 2640 - protein, 107 aa, synthetic construct; identical to SEQ ID NO: 2588

SEQ ID NO: 2641 - protein, 107 aa, synthetic construct
DIQMTQSPSSLSASVGDRVTITCRASQSISTYVNWYQQKPGKAPKLLIYTASSLQGGVPSRFSGSGSGTDFTLTISSLQPEDFATYYCQQSYTTPWTFGGGTKVEIK

SEQ ID NO: 2642 - protein, 107 aa, synthetic construct; identical to SEQ ID NO: 2525

SEQ ID NO: 2643 - protein, 107 aa, synthetic construct; identical to SEQ ID NO: 2588

SEQ ID NO: 2644 - DNA, 62 bp, synthetic construct
  source 1..62: mol_type = other DNA
  modified_base 52: mod_base = OTHER; mod_base = OTHER; note = Thymidine-succinyl hexamide CED phosphoramidite
  modified_base 51: mod_base = OTHER; note = Thymidine-succinyl hexamide CED phosphoramidite
agacaatcaaccatttggggtggacagccttgacctctagacttcggcatnntttttttttt

SEQ ID NO: 2645 - DNA, 112 bp, synthetic construct
  source 1..112: mol_type = other DNA
  modified_base 101: mod_base = OTHER; mod_base = OTHER; note = Thymidine-succinyl hexamide CED phosphoramidite
  modified_base 102: mod_base = OTHER; note = Thymidine-succinyl hexamide CED phosphoramidite
cgggatccttatcgtcatcgtcgtacagatcccgacccatttgctgtccaccagtcatgctagccataccatgatgatgatgatgatgagaaccccgcatnntttttttttt

SEQ ID NO: 2646 - DNA, 19 bp, synthetic construct
  source 1..19: mol_type = other DNA
atgcggggttctcatcatc

SEQ ID NO: 2647 - DNA, 20 bp, synthetic construct
  source 1..20: mol_type = other DNA
cgggatccttatcgtcatcg

What is claimed is:

1. An antibody or antibody fragment comprising a variable domain, heavy chain region (VH) and a variable domain, light chain region (VL), wherein the VH comprises an amino acid sequence at least about 90% identical to any one of SEQ ID NOs: 1-1628; and the VL comprises an amino acid sequence at least about 90% identical to any one of SEQ ID NOs: 1629-2643.

2. The antibody or antibody fragment of claim 1, wherein the antibody is a monoclonal antibody, a polyclonal antibody, a bi-specific antibody, a multispecific antibody, a grafted antibody, a human antibody, a humanized antibody, a synthetic antibody, a chimeric antibody, a camelized antibody, a single-chain Fvs (scFv), a single chain antibody, a Fab fragment, a F(ab′)2 fragment, a Fd fragment, a Fv fragment, a single-domain antibody, an isolated complementarity determining region (CDR), a diabody, a fragment comprised of only a single monomeric variable domain, disulfide-linked Fvs (sdFv), an intrabody, an anti-idiotypic (anti-Id) antibody, or ab antigen-binding fragments thereof.

3-5. (canceled)

6. The antibody or antibody fragment of claim 1, wherein the VH comprises an amino acid sequence at least about 90% identical to any one of SEQ ID NOs: 1-301; and the VL comprises an amino acid sequence at least about 90% identical to any one of SEQ ID NOs: 1629-1811.

7. (canceled)

8. The antibody or antibody fragment of claim 1, wherein the VH comprises an amino acid sequence at least about 90% identical to any one of SEQ ID NOs: 302-790; and the VL comprises an amino acid sequence at least about 90% identical to any one of SEQ ID NOs: 1812-2112.

9. (canceled)

10. The antibody or antibody fragment of claim 1, wherein the VH comprises an amino acid sequence at least about 90% identical to any one of SEQ ID NOs: 791-1187; and the VL comprises an amino acid sequence at least about 90% identical to any one of SEQ ID NOs: 2113-2357.

11. (canceled)

12. The antibody or antibody fragment of claim 1, wherein the VH comprises an amino acid sequence at least about 90% identical to any one of SEQ ID NOs: 1188-1628; and the VL comprises an amino acid sequence at least about 90% identical to any one of SEQ ID NOs: 2358-2643.

13. (canceled)

14. An antibody or antibody fragment comprising a variable domain, heavy chain region (VH), wherein the VH comprises an amino acid sequence at least about 90% identical to any one of SEQ ID NOs: 1-1628.

15. The antibody or antibody fragment of claim 14, wherein the antibody is a monoclonal antibody, a polyclonal antibody, a bi-specific antibody, a multispecific antibody, a grafted antibody, a human antibody, a humanized antibody, a synthetic antibody, a chimeric antibody, a camelized antibody, a single-chain Fvs (scFv), a single chain antibody, a Fab fragment, a F(ab′)2 fragment, a Fd fragment, a Fv fragment, a single-domain antibody, an isolated complementarity determining region (CDR), a diabody, a fragment comprised of only a single monomeric variable domain, disulfide-linked Fvs (sdFv), an intrabody, an anti-idiotypic (anti-Id) antibody, or ab antigen-binding fragments thereof.

16-17. (canceled)

18. The antibody or antibody fragment of claim 14, wherein the VH comprises an amino acid sequence at least about 90% identical to any one of SEQ ID NOs: 1-301.

19. (canceled)

20. The antibody or antibody fragment of claim 14, wherein the VH comprises an amino acid sequence at least about 90% identical to any one of SEQ ID NOs: 302-790.

21. (canceled)

22. The antibody or antibody fragment of claim 14, wherein the VH comprises an amino acid sequence at least about 90% identical to any one of SEQ ID NOs: 791-1187.

23. (canceled)

24. The antibody or antibody fragment of claim 14, wherein the VH comprises an amino acid sequence at least about 90% identical to any one of SEQ ID NOs: 1188-1628.

25. (canceled)

26. An antibody or antibody fragment comprising a variable domain, light chain region (VL), wherein the VL comprises an amino acid sequence at least about 90% identical to any one of SEQ ID NOs: 1629-2643.

27. The antibody or antibody fragment of claim 26, wherein the antibody is a monoclonal antibody, a polyclonal antibody, a bi-specific antibody, a multispecific antibody, a grafted antibody, a human antibody, a humanized antibody, a synthetic antibody, a chimeric antibody, a camelized antibody, a single-chain Fvs (scFv), a single chain antibody, a Fab fragment, a F(ab′)2 fragment, a Fd fragment, a Fv fragment, a single-domain antibody, an isolated complementarity determining region (CDR), a diabody, a fragment comprised of only a single monomeric variable domain, disulfide-linked Fvs (sdFv), an intrabody, an anti-idiotypic (anti-Id) antibody, or ab antigen-binding fragments thereof.

28-29. (canceled)

30. The antibody or antibody fragment of claim 26, wherein the VL comprises an amino acid sequence at least about 90% identical to any one of SEQ ID NOs: 1629-1811.

31. (canceled)

32. The antibody or antibody fragment of claim 26, wherein the VL comprises an amino acid sequence at least about 90% identical to any one of SEQ ID NOs: 1812-2112.

33. (canceled)

34. The antibody or antibody fragment of claim 14, wherein the VH comprises an amino acid sequence at least about 90% identical to any one of SEQ ID NOs: 2113-2357.

35. (canceled)

36. The antibody or antibody fragment of claim 14, wherein the VH comprises an amino acid sequence at least about 90% identical to any one of SEQ ID NOs: 2358-2643.

37. (canceled)

38. A nucleic acid composition comprising:
a) a first nucleic acid encoding a variable domain, heavy chain region (VH), wherein the VH comprises an amino acid sequence at least about 90% identical to any one of SEQ ID NOs: 1-1628;
b) a second nucleic acid encoding a variable domain, light chain region (VL), wherein the VL comprises an amino acid sequence at least about 90% identical to any one of SEQ ID NOs: 1629-2643; and
c) an excipient.

39-48. (canceled)

49. A nucleic acid composition comprising:
a) a first nucleic acid encoding a variable domain, heavy chain region (VH) comprising an amino acid sequence at least about 90% identical to a sequence as set forth in any one of SEQ ID NOs: 1-1628;
b) a second nucleic acid encoding a variable domain, light chain region (VL) comprising at least about 90% identical to a sequence as set forth in any one of SEQ ID NOs: 1629-2643; and
c) an excipient.

50-58. (canceled)
